United States Patent Application Publication US 2022/0256795 A1 - sequence listing, part 6

SEQ ID NO: 4 - DNA, 3771400 bp, Glycine tomentella (residues 1,885,701-3,771,400 of 3,771,400)
  misc_feature (1552)..(3454): n is a, c, g, or t
  misc_feature (5653)..(7177): n is a, c, g, or t
  misc_feature (14042)..(14531): n is a, c, g, or t
  misc_feature (16332)..(17113): n is a, c, g, or t
  misc_feature (33074)..(33405): n is a, c, g, or t
  misc_feature (38044)..(38594): n is a, c, g, or t
  misc_feature (40206)..(42493): n is a, c, g, or t
  misc_feature (43200)..(44413): n is a, c, g, or t
  misc_feature (51635)..(52051): n is a, c, g, or t
  misc_feature (67934)..(68085): n is a, c, g, or t
  misc_feature (68641)..(69760): n is a, c, g, or t
  misc_feature (74240)..(74530): n is a, c, g, or t
  misc_feature (80406)..(80456): n is a, c, g, or t
  misc_feature (82203)..(84017): n is a, c, g, or t
  misc_feature (84984)..(85167): n is a, c, g, or t
  misc_feature (91340)..(91834): n is a, c, g, or t
  misc_feature (92133)..(92142): n is a, c, g, or t
  misc_feature (92450)..(92528): n is a, c, g, or t
  misc_feature (95257)..(95266): n is a, c, g, or t
  misc_feature (103582)..(104192): n is a, c, g, or t
  misc_feature (106719)..(107424): n is a, c, g, or t
  misc_feature (122202)..(122728): n is a, c, g, or t
  misc_feature (148235)..(148250): n is a, c, g, or t
  misc_feature (163693)..(163762): n is a, c, g, or t
  misc_feature (207647)..(207911): n is a, c, g, or t
  misc_feature (209347)..(209727): n is a, c, g, or t
  misc_feature (212535)..(213537): n is a, c, g, or t
  misc_feature (220477)..(220670): n is a, c, g, or t
  misc_feature (237198)..(237344): n is a, c, g, or t
  misc_feature (263205)..(264433): n is a, c, g, or t
  misc_feature (272347)..(273006): n is a, c, g, or t
  misc_feature (291557)..(292033): n is a, c, g, or t
  misc_feature (308918)..(309077): n is a, c, g, or t
  misc_feature (310812)..(311177): n is a, c, g, or t
  misc_feature (315486)..(315495): n is a, c, g, or t
  misc_feature (319196)..(319597): n is a, c, g, or t
  misc_feature (341077)..(342403): n is a, c, g, or t
  misc_feature (368260)..(369106): n is a, c, g, or t
  misc_feature (371417)..(373819): n is a, c, g, or t
  misc_feature (374674)..(375021): n is a, c, g, or t
  misc_feature (377553)..(378329): n is a, c, g, or t
  misc_feature (389500)..(390095): n is a, c, g, or t
  misc_feature (391944)..(392048): n is a, c, g, or t
  misc_feature (397402)..(398531): n is a, c, g, or t
  misc_feature (407728)..(408061): n is a, c, g, or t
  misc_feature (411173)..(411801): n is a, c, g, or t
  misc_feature (419683)..(421244): n is a, c, g, or t
  misc_feature (425779)..(426508): n is a, c, g, or t
  misc_feature (432041)..(432475): n is a, c, g, or t
  misc_feature (433860)..(434851): n is a, c, g, or t
  misc_feature (441668)..(442812): n is a, c, g, or t
  misc_feature (457026)..(458248): n is a, c, g, or t
  misc_feature (461651)..(463395): n is a, c, g, or t
  misc_feature (465493)..(465647): n is a, c, g, or t
  misc_feature (466943)..(468253): n is a, c, g, or t
  misc_feature (472230)..(472837): n is a, c, g, or t
  misc_feature (487665)..(487949): n is a, c, g, or t
  misc_feature (488468)..(488587): n is a, c, g, or t
  misc_feature (499864)..(500369): n is a, c, g, or t
  misc_feature (509328)..(510577): n is a, c, g, or t
  misc_feature (514796)..(515221): n is a, c, g, or t
  misc_feature (525608)..(526358): n is a, c, g, or t
  misc_feature (547010)..(547760): n is a, c, g, or t
  misc_feature (558919)..(559850): n is a, c, g, or t
  misc_feature (566283)..(567089): n is a, c, g, or t
  misc_feature (569070)..(569079): n is a, c, g, or t
  misc_feature (571674)..(571975): n is a, c, g, or t
  misc_feature (572737)..(575746): n is a, c, g, or t
  misc_feature (576963)..(577586): n is a, c, g, or t
  misc_feature (584528)..(584983): n is a, c, g, or t
  misc_feature (605272)..(605579): n is a, c, g, or t
  misc_feature (609394)..(610165): n is a, c, g, or t
  misc_feature (617896)..(618686): n is a, c, g, or t
  misc_feature (625074)..(626337): n is a, c, g, or t
  misc_feature (627258)..(627267): n is a, c, g, or t
  misc_feature (663437)..(663446): n is a, c, g, or t
  misc_feature (677239)..(678364): n is a, c, g, or t
  misc_feature (691304)..(691622): n is a, c, g, or t
  misc_feature (694593)..(695408): n is a, c, g, or t
  misc_feature (696667)..(699377): n is a, c, g, or t
  misc_feature (700104)..(701196): n is a, c, g, or t
  misc_feature (705689)..(706903): n is a, c, g, or t
  misc_feature (709805)..(710830): n is a, c, g, or t
  misc_feature (711485)..(711664): n is a, c, g, or t
  misc_feature (715293)..(716133): n is a, c, g, or t
  misc_feature (720192)..(720375): n is a, c, g, or t
  misc_feature (727091)..(728152): n is a, c, g, or t
  misc_feature (728581)..(728802): n is a, c, g, or t
  misc_feature (730564)..(731565): n is a, c, g, or t
  misc_feature (732775)..(735305): n is a, c, g, or t
  misc_feature (736276)..(739104): n is a, c, g, or t
  misc_feature (740504)..(740683): n is a, c, g, or t
  misc_feature (745824)..(745833): n is a, c, g, or t
  misc_feature (746627)..(747147): n is a, c, g, or t
  misc_feature (751305)..(751913): n is a, c, g, or t
  misc_feature (756586)..(757020): n is a, c, g, or t
  misc_feature (757601)..(758834): n is a, c, g, or t
  misc_feature (768414)..(770335): n is a, c, g, or t
  misc_feature (771642)..(772619): n is a, c, g, or t
  misc_feature (774210)..(774219): n is a, c, g, or t
  misc_feature (778042)..(782454): n is a, c, g, or t
  misc_feature (789571)..(790087): n is a, c, g, or t
  misc_feature (792649)..(792930): n is a, c, g, or t
  misc_feature (799641)..(800498): n is a, c, g, or t
  misc_feature (808221)..(809554): n is a, c, g, or t
  misc_feature (821576)..(821784): n is a, c, g, or t
  misc_feature (828575)..(829354): n is a, c, g, or t
  misc_feature (839949)..(840264): n is a, c, g, or t
  misc_feature (842111)..(842655): n is a, c, g, or t
  misc_feature (847994)..(848495): n is a, c, g, or t
  misc_feature (853919)..(854241): n is a, c, g, or t
  misc_feature (857078)..(857505): n is a, c, g, or t
  misc_feature (868382)..(869694): n is a, c, g, or t
  misc_feature (880598)..(881115): n is a, c, g, or t
  misc_feature (895058)..(895306): n is a, c, g, or t
  misc_feature (900259)..(900390): n is a, c, g, or t
  misc_feature (902518)..(903087): n is a, c, g, or t
  misc_feature (907240)..(907665): n is a, c, g, or t
  misc_feature (907803)..(908436): n is a, c, g, or t
  misc_feature (911740)..(912234): n is a, c, g, or t
  misc_feature (917770)..(920015): n is a, c, g, or t
  misc_feature (921886)..(924214): n is a, c, g, or t
  misc_feature (935909)..(936079): n is a, c, g, or t
  misc_feature (940572)..(941300): n is a, c, g, or t
  misc_feature (964919)..(965552): n is a, c, g, or t
  misc_feature (968461)..(968470): n is a, c, g, or t
  misc_feature (983074)..(984200): n is a, c, g, or t
  misc_feature (987787)..(987934): n is a, c, g, or t
  misc_feature (988886)..(989540): n is a, c, g, or t
  misc_feature (996469)..(996923): n is a, c, g, or t
  misc_feature (1002811)..(1003416): n is a, c, g, or t
  misc_feature (1013241)..(1013708): n is a, c, g, or t
  misc_feature (1017110)..(1018039): n is a, c, g, or t
  misc_feature (1019869)..(1023158): n is a, c, g, or t
  misc_feature (1024742)..(1026284): n is a, c, g, or t
  misc_feature (1027236)..(1029131): n is a, c, g, or t
  misc_feature (1030180)..(1031934): n is a, c, g, or t
  misc_feature (1042028)..(1042427): n is a, c, g, or t
  misc_feature (1046951)..(1047364): n is a, c, g, or t
  misc_feature (1063230)..(1064182): n is a, c, g, or t
  misc_feature (1080876)..(1081350): n is a, c, g, or t
  misc_feature (1083820)..(1083829): n is a, c, g, or t
  misc_feature (1086180)..(1086431): n is a, c, g, or t
  misc_feature (1093782)..(1094300): n is a, c, g, or t
  misc_feature (1097960)..(1098927): n is a, c, g, or t
  misc_feature (1105724)..(1106919): n is a, c, g, or t
  misc_feature (1115468)..(1115940): n is a, c, g, or t
  misc_feature (1131661)..(1131670): n is a, c, g, or t
  misc_feature (1133112)..(1133889): n is a, c, g, or t
  misc_feature (1136881)..(1138569): n is a, c, g, or t
  misc_feature (1139196)..(1140233): n is a, c, g, or t
  misc_feature (1147636)..(1148052): n is a, c, g, or t
  misc_feature (1155767)..(1155831): n is a, c, g, or t
  misc_feature (1156479)..(1156488): n is a, c, g, or t
  misc_feature (1157626)..(1157853): n is a, c, g, or t
  misc_feature (1163645)..(1163724): n is a, c, g, or t
  misc_feature (1176822)..(1177249): n is a, c, g, or t
  misc_feature (1179638)..(1180437): n is a, c, g, or t
  misc_feature (1182985)..(1183421): n is a, c, g, or t
  misc_feature (1184691)..(1185126): n is a, c, g, or t
  misc_feature (1188184)..(1188439): n is a, c, g, or t
  misc_feature (1198579)..(1200299): n is a, c, g, or t
  misc_feature (1209290)..(1210016): n is a, c, g, or t
  misc_feature (1217134)..(1217372): n is a, c, g, or t
  misc_feature (1219409)..(1220516): n is a, c, g, or t
  misc_feature (1222789)..(1223682): n is a, c, g, or t
  misc_feature (1224108)..(1224332): n is a, c, g, or t
  misc_feature (1226416)..(1227831): n is a, c, g, or t
  misc_feature (1228949)..(1228958): n is a, c, g, or t
  misc_feature (1232011)..(1232964): n is a, c, g, or t
  misc_feature (1239029)..(1239209): n is a, c, g, or t
  misc_feature (1239901)..(1240081): n is a, c, g, or t
  misc_feature (1266517)..(1266647): n is a, c, g, or t
  misc_feature (1274678)..(1275787): n is a, c, g, or t
  misc_feature (1276963)..(1277467): n is a, c, g, or t
  misc_feature (1282764)..(1283026): n is a, c, g, or t
  misc_feature (1286249)..(1286392): n is a, c, g, or t
  misc_feature (1291006)..(1293033): n is a, c, g, or t
  misc_feature (1294636)..(1296850): n is a, c, g, or t
  misc_feature (1340024)..(1341086): n is a, c, g, or t
  misc_feature (1345867)..(1345876): n is a, c, g, or t
  misc_feature (1352172)..(1352699): n is a, c, g, or t
  misc_feature (1367276)..(1367673): n is a, c, g, or t
  misc_feature (1371833)..(1372349): n is a, c, g, or t
  misc_feature (1373554)..(1374036): n is a, c, g, or t
  misc_feature (1376710)..(1377067): n is a, c, g, or t
  misc_feature (1391867)..(1392719): n is a, c, g, or t
  misc_feature (1393976)..(1393985): n is a, c, g, or t
  misc_feature (1414361)..(1414516): n is a, c, g, or t
  misc_feature (1414966)..(1417052): n is a, c, g, or t
  misc_feature (1449044)..(1449297): n is a, c, g, or t
  misc_feature (1460391)..(1461402): n is a, c, g, or t
  misc_feature (1463369)..(1463697): n is a, c, g, or t
  misc_feature (1466381)..(1469323): n is a, c, g, or t
  misc_feature (1470174)..(1472353): n is a, c, g, or t
  misc_feature (1487675)..(1488988): n is a, c, g, or t
  misc_feature (1499336)..(1500876): n is a, c, g, or t
  misc_feature (1503393)..(1504152): n is a, c, g, or t
  misc_feature (1508406)..(1508643): n is a, c, g, or t
  misc_feature (1513395)..(1513810): n is a, c, g, or t
  misc_feature (1543858)..(1544389): n is a, c, g, or t
  misc_feature (1545470)..(1545816): n is a, c, g, or t
  misc_feature (1549517)..(1550463): n is a, c, g, or t
  misc_feature (1552771)..(1552909): n is a, c, g, or t
  misc_feature (1562145)..(1562216): n is a, c, g, or t
  misc_feature (1569535)..(1569674): n is a, c, g, or t
  misc_feature (1572803)..(1572882): n is a, c, g, or t
  misc_feature (1573660)..(1574232): n is a, c, g, or t
  misc_feature (1579414)..(1579604): n is a, c, g, or t
  misc_feature (1585948)..(1586528): n is a, c, g, or t
  misc_feature (1625423)..(1625912): n is a, c, g, or t
  misc_feature (1634103)..(1635046): n is a, c, g, or t
  misc_feature (1646482)..(1646902): n is a, c, g, or t
  misc_feature (1652680)..(1653135): n is a, c, g, or t
  misc_feature (1657133)..(1658011): n is a, c, g, or t
  misc_feature (1663478)..(1664117): n is a, c, g, or t
  misc_feature (1667209)..(1667500): n is a, c, g, or t
  misc_feature (1676409)..(1676890): n is a, c, g, or t
  misc_feature (1677745)..(1677754): n is a, c, g, or t
  misc_feature (1684135)..(1685348): n is a, c, g, or t
  misc_feature (1691563)..(1693991): n is a, c, g, or t
  misc_feature (1697678)..(1698412): n is a, c, g, or t
  misc_feature (1706706)..(1707095): n is a, c, g, or t
  misc_feature (1710494)..(1712169): n is a, c, g, or t
  misc_feature (1723360)..(1724145): n is a, c, g, or t
  misc_feature (1726103)..(1726381): n is a, c, g, or t
  misc_feature (1727526)..(1727704): n is a, c, g, or t
  misc_feature (1734141)..(1734781): n is a, c, g, or t
  misc_feature (1735588)..(1736135): n is a, c, g, or t
  misc_feature (1738742)..(1739914): n is a, c, g, or t
  misc_feature (1740504)..(1740720): n is a, c, g, or t
  misc_feature (1742500)..(1743309): n is a, c, g, or t
  misc_feature (1754575)..(1754888): n is a, c, g, or t
  misc_feature (1768741)..(1769506): n is a, c, g, or t
  misc_feature (1771264)..(1771273): n is a, c, g, or t
  misc_feature (1772411)..(1774093): n is a, c, g, or t
  misc_feature (1787517)..(1787970): n is a, c, g, or t
  misc_feature (1814043)..(1814055): n is a, c, g, or t
  misc_feature (1819132)..(1819778): n is a, c, g, or t
  misc_feature (1828359)..(1829360): n is a, c, g, or t
  misc_feature (1832992)..(1833553): n is a, c, g, or t
  misc_feature (1849342)..(1849867): n is a, c, g, or t
  misc_feature (1853584)..(1854274): n is a, c, g, or t
  misc_feature (1855729)..(1856447): n is a, c, g, or t
  misc_feature (1862844)..(1863061): n is a, c, g, or t
  misc_feature (1872183)..(1872337): n is a, c, g, or t
  misc_feature (1880017)..(1880526): n is a, c, g, or t
  misc_feature (1882083)..(1882092): n is a, c, g, or t
  misc_feature (1883604)..(1883874): n is a, c, g, or t
  misc_feature (1900385)..(1901610): n is a, c, g, or t
  misc_feature (1913375)..(1913424): n is a, c, g, or t
  misc_feature (1919702)..(1920180): n is a, c, g, or t
  misc_feature (1927448)..(1927824): n is a, c, g, or t
  misc_feature (1935739)..(1935865): n is a, c, g, or t
  misc_feature (1939886)..(1940005): n is a, c, g, or t
  misc_feature (1945223)..(1945306): n is a, c, g, or t
  misc_feature (1949239)..(1949380): n is a, c, g, or t
  misc_feature (1951086)..(1952331): n is a, c, g, or t
  misc_feature (1959556)..(1959767): n is a, c, g, or t
  misc_feature (1966186)..(1967076): n is a, c, g, or t
  misc_feature (1969444)..(1969453): n is a, c, g, or t
  misc_feature (1972147)..(1973800): n is a, c, g, or t
  misc_feature (1977712)..(1977990): n is a, c, g, or t
  misc_feature (1986366)..(1986926): n is a, c, g, or t
  misc_feature (1989195)..(1989819): n is a, c, g, or t
  misc_feature (1992213)..(1993822): n is a, c, g, or t
  misc_feature (1999731)..(2001678): n is a, c, g, or t
  misc_feature (2025860)..(2026509): n is a, c, g, or t
  misc_feature (2032735)..(2033774): n is a, c, g, or t
  misc_feature (2036117)..(2036452): n is a, c, g, or t
  misc_feature (2039533)..(2041503): n is a, c, g, or t
  misc_feature (2043074)..(2043586): n is a, c, g, or t
  misc_feature (2044687)..(2045042): n is a, c, g, or t
  misc_feature (2045925)..(2046367): n is a, c, g, or t
  misc_feature (2048901)..(2049614): n is a, c, g, or t
  misc_feature (2053761)..(2054237): n is a, c, g, or t
  misc_feature (2055053)..(2055465): n is a, c, g, or t
  misc_feature (2058761)..(2060837): n is a, c, g, or t
  misc_feature (2073049)..(2073410): n is a, c, g, or t
  misc_feature (2074755)..(2074817): n is a, c, g, or t
  misc_feature (2076668)..(2077648): n is a, c, g, or t
  misc_feature (2078104)..(2079057): n is a, c, g, or t
  misc_feature (2080934)..(2082369): n is a, c, g, or t
  misc_feature (2090301)..(2090970): n is a, c, g, or t
  misc_feature (2096234)..(2096801): n is a, c, g, or t
  misc_feature (2099631)..(2099787): n is a, c, g, or t
  misc_feature (2104744)..(2105927): n is a, c, g, or t
  misc_feature (2107503)..(2107737): n is a, c, g, or t
  misc_feature (2110074)..(2110548): n is a, c, g, or t
  misc_feature (2116376)..(2116851): n is a, c, g, or t
  misc_feature (2122727)..(2123200): n is a, c, g, or t
  misc_feature (2129083)..(2130212): n is a, c, g, or t
  misc_feature (2135588)..(2136039): n is a, c, g, or t
  misc_feature (2137401)..(2139656): n is a, c, g, or t
  misc_feature (2152878)..(2153599): n is a, c, g, or t
  misc_feature (2155897)..(2156812): n is a, c, g, or t
  misc_feature (2162239)..(2162394): n is a, c, g, or t
  misc_feature (2170226)..(2170235): n is a, c, g, or t
  misc_feature (2183827)..(2184016): n is a, c, g, or t
  misc_feature (2192039)..(2192713): n is a, c, g, or t
  misc_feature (2195551)..(2195706): n is a, c, g, or t
  misc_feature (2200205)..(2200501): n is a, c, g, or t
  misc_feature (2204112)..(2204121): n is a, c, g, or t
  misc_feature (2207771)..(2207780): n is a, c, g, or t
  misc_feature (2208711)..(2208991): n is a, c, g, or t
  misc_feature (2215532)..(2216729): n is a, c, g, or t
  misc_feature (2221370)..(2222103): n is a, c, g, or t
  misc_feature (2227574)..(2228255): n is a, c, g, or t
  misc_feature (2235787)..(2236653): n is a, c, g, or t
  misc_feature (2237005)..(2237375): n is a, c, g, or t
  misc_feature (2238525)..(2240991): n is a, c, g, or t
  misc_feature (2242217)..(2242320): n is a, c, g, or t
  misc_feature (2243184)..(2245275): n is a, c, g, or t
  misc_feature (2251968)..(2252963): n is a, c, g, or t
  misc_feature (2263612)..(2265687): n is a, c, g, or t
  misc_feature (2266385)..(2267404): n is a, c, g, or t
  misc_feature (2271251)..(2272239): n is a, c, g, or t
  misc_feature (2273905)..(2274980): n is a, c, g, or t
  misc_feature (2287925)..(2288412): n is a, c, g, or t
  misc_feature (2288991)..(2289130): n is a, c, g, or t
  misc_feature (2290990)..(2291540): n is a, c, g, or t
  misc_feature (2298060)..(2298953): n is a, c, g, or t
  misc_feature (2305635)..(2305855): n is a, c, g, or t
  misc_feature (2311127)..(2312575): n is a, c, g, or t
  misc_feature (2321414)..(2322012): n is a, c, g, or t
  misc_feature (2323689)..(2323859): n is a, c, g, or t
  misc_feature (2334806)..(2335819): n is a, c, g, or t
  misc_feature (2336155)..(2336164): n is a, c, g, or t
  misc_feature (2336679)..(2336993): n is a, c, g, or t
  misc_feature (2339664)..(2340486): n is a, c, g, or t
  misc_feature (2347375)..(2348331): n is a, c, g, or t
  misc_feature (2355560)..(2356062): n is a, c, g, or t
  misc_feature (2360254)..(2361041): n is a, c, g, or t
  misc_feature (2364431)..(2366228): n is a, c, g, or t
  misc_feature (2379211)..(2379885): n is a, c, g, or t
  misc_feature (2380592)..(2381115): n is a, c, g, or t
  misc_feature (2388152)..(2388637): n is a, c, g, or t
  misc_feature (2393315)..(2393888): n is a, c, g, or t
  misc_feature (2398326)..(2399032): n is a, c, g, or t
  misc_feature (2411913)..(2412430): n is a, c, g, or t
  misc_feature (2416220)..(2416618): n is a, c, g, or t
  misc_feature (2419487)..(2420436): n is a, c, g, or t
  misc_feature (2425229)..(2425240): n is a, c, g, or t
  misc_feature (2435865)..(2435874): n is a, c, g, or t
  misc_feature (2446097)..(2446609): n is a, c, g, or t
  misc_feature (2468425)..(2469018): n is a, c, g, or t
  misc_feature (2469970)..(2469979): n is a, c, g, or t
  misc_feature (2475805)..(2476281): n is a, c, g, or t
  misc_feature (2490536)..(2490759): n is a, c, g, or t
  misc_feature (2494165)..(2494937): n is a, c, g, or t
  misc_feature (2496347)..(2496955): n is a, c, g, or t
  misc_feature (2508131)..(2508347): n is a, c, g, or t
  misc_feature (2510834)..(2510843): n is a, c, g, or t
  misc_feature (2518846)..(2519237): n is a, c, g, or t
  misc_feature (2524522)..(2525074): n is a, c, g, or t
  misc_feature (2544115)..(2544758): n is a, c, g, or t
  misc_feature (2551729)..(2552371): n is a, c, g, or t
  misc_feature (2554938)..(2555751): n is a, c, g, or t
  misc_feature (2563269)..(2563511): n is a, c, g, or t
  misc_feature (2576782)..(2577129): n is a, c, g, or t
  misc_feature (2580032)..(2580469): n is a, c, g, or t
  misc_feature (2598566)..(2599386): n is a, c, g, or t
  misc_feature (2601993)..(2602316): n is a, c, g, or t
  misc_feature (2612592)..(2613945): n is a, c, g, or t
  misc_feature (2617277)..(2617840): n is a, c, g, or t
  misc_feature (2634290)..(2634539): n is a, c, g, or t
  misc_feature (2640950)..(2641015): n is a, c, g, or t
  misc_feature (2643462)..(2643807): n is a, c, g, or t
  misc_feature (2653580)..(2655011): n is a, c, g, or t
  misc_feature (2664306)..(2665182): n is a, c, g, or t
  misc_feature (2665718)..(2666244): n is a, c, g, or t
  misc_feature (2668695)..(2669251): n is a, c, g, or t
  misc_feature (2680675)..(2680842): n is a, c, g, or t
  misc_feature (2684186)..(2684781): n is a, c, g, or t
  misc_feature (2696402)..(2696739): n is a, c, g, or t
  misc_feature (2704098)..(2704320): n is a, c, g, or t
  misc_feature (2706517)..(2706875): n is a, c, g, or t
  misc_feature (2710251)..(2710576): n is a, c, g, or t
  misc_feature (2712326)..(2712335): n is a, c, g, or t
  misc_feature (2713094)..(2713215): n is a, c, g, or t
  misc_feature (2741299)..(2741496): n is a, c, g, or t
  misc_feature (2744837)..(2745641): n is a, c, g, or t
  misc_feature (2756171)..(2756751): n is a, c, g, or t
  misc_feature (2756889)..(2757517): n is a, c, g, or t
  misc_feature (2782403)..(2782568): n is a, c, g, or t
  misc_feature (2792221)..(2792382): n is a, c, g, or t
  misc_feature (2796608)..(2798266): n is a, c, g, or t
  misc_feature (2804317)..(2805181): n is a, c, g, or t
  misc_feature (2812497)..(2813548): n is a, c, g, or t
  misc_feature (2816250)..(2816294): n is a, c, g, or t
  misc_feature (2843364)..(2844769): n is a, c, g, or t
  misc_feature (2845719)..(2846347): n is a, c, g, or t
  misc_feature (2868809)..(2869501): n is a, c, g, or t
  misc_feature (2874410)..(2874655): n is a, c, g, or t
  misc_feature (2875373)..(2875421): n is a, c, g, or t
  misc_feature (2877536)..(2878017): n is a, c, g, or t
  misc_feature (2898613)..(2899327): n is a, c, g, or t
  misc_feature (2901303)..(2901873): n is a, c, g, or t
  misc_feature (2910413)..(2910998): n is a, c, g, or t
  misc_feature (2913423)..(2916158): n is a, c, g, or t
  misc_feature (2921199)..(2921934): n is a, c, g, or t
  misc_feature (2923537)..(2927958): n is a, c, g, or t
  misc_feature (2928306)..(2928725): n is a, c, g, or t
  misc_feature (2937378)..(2938098): n is a, c, g, or t
  misc_feature (2956640)..(2956770): n is a, c, g, or t
  misc_feature (2958244)..(2958513): n is a, c, g, or t
  misc_feature (2961010)..(2962355): n is a, c, g, or t
  misc_feature (2974263)..(2974272): n is a, c, g, or t
  misc_feature (2974846)..(2974855): n is a, c, g, or t
  misc_feature (2983474)..(2983984): n is a, c, g, or t
  misc_feature (2984775)..(2985933): n is a, c, g, or t
  misc_feature (2989736)..(2989969): n is a, c, g, or t
  misc_feature (2994539)..(2994626): n is a, c, g, or t
  misc_feature (2999010)..(2999019): n is a, c, g, or t
  misc_feature (3006041)..(3006536): n is a, c, g, or t
  misc_feature (3019416)..(3019791): n is a, c, g, or t
  misc_feature (3024020)..(3026007): n is a, c, g, or t
  misc_feature (3028831)..(3031062): n is a, c, g, or t
  misc_feature (3031922)..(3033332): n is a, c, g, or t
  misc_feature (3033823)..(3034028): n is a, c, g, or t
  misc_feature (3035765)..(3036765): n is a, c, g, or t
  misc_feature (3041566)..(3041922): n is a, c, g, or t
  misc_feature (3047445)..(3047517): n is a, c, g, or t
  misc_feature (3048238)..(3048916): n is a, c, g, or t
  misc_feature (3063843)..(3065144): n is a, c, g, or t
  misc_feature (3070717)..(3071144): n is a, c, g, or t
  misc_feature (3072653)..(3072662): n is a, c, g, or t
  misc_feature (3113133)..(3113239): n is a, c, g, or t
  misc_feature (3130455)..(3131536): n is a, c, g, or t
  misc_feature (3185977)..(3186406): n is a, c, g, or t
  misc_feature (3188364)..(3190095): n is a, c, g, or t
  misc_feature (3192980)..(3193724): n is a, c, g, or t
  misc_feature (3210713)..(3211565): n is a, c, g, or t
  misc_feature (3229591)..(3230487): n is a, c, g, or t
  misc_feature (3381223)..(3383659): n is a, c, g, or t
  misc_feature (3406220)..(3406897): n is a, c, g, or t
  misc_feature (3410160)..(3410169): n is a, c, g, or t
  misc_feature (3421256)..(3421265): n is a, c, g, or t
  misc_feature (3422437)..(3423908): n is a, c, g, or t
  misc_feature (3477431)..(3477478): n is a, c, g, or t
  misc_feature (3510511)..(3510713): n is a, c, g, or t
  misc_feature (3511004)..(3511164): n is a, c, g, or t
  misc_feature (3534517)..(3536057): n is a, c, g, or t
  misc_feature (3562147)..(3562197): n is a, c, g, or t
  misc_feature (3585108)..(3586248): n is a, c, g, or t
  misc_feature (3630839)..(3632104): n is a, c, g, or t
  misc_feature (3657066)..(3657744): n is a, c, g, or t
  misc_feature (3660075)..(3660890): n is a, c, g, or t
  misc_feature (3664708)..(3665308): n is a, c, g, or t
  misc_feature (3666216)..(3667376): n is a, c, g, or t
  misc_feature (3710638)..(3711758): n is a, c, g, or t
  misc_feature (3746990)..(3747572): n is a, c, g, or t
attaccctgatcagtaaatgcatcatgcatgaatgaatttgtaatccttttttactttttgataagtcaacttcaatattttttttttatctctccttttctctcaggaatacgcttcccaggattacaaagcgtcttatgattctgatattattttcgtccctgacagggtaagcttttggtgtaatgtcttttattcatttactttgattatcacgatagatttctacttttttgtttgaaataattaaaaaaaaaacaaacaaacataaagccattgataactgaataaccaattagtttgaaaaataaattaataacccgaagcaacatcaaaatgcagaagtatacagataataatttgttctgcatgcagacttcttcaatctactaattagaccatatttaagactctgcatggaattcctgccaaagacccattccaaataacatgaacagaagtggaataagatgaaaaagtatatatgtgaaagtaatagggggattggaaaatcagctatttagactttcaatttttaaaattattacaagtcactatttttaaacctcttgcagataatatagtgaagatcatgaactatctcgttttcttgaatatgcatagttacaggaaatcagatgctttgttttgtggggctgaaatattcatccgctacaattgtaggtgcactgacaaatttgttcccagcattcactttcgtccttgcagttctcttcaggttggtagcaaacaaattggacctatggtttatttccacaccaggccttccaaatggccaaaaaagaaagttattggtatttgacgatgttttattattttattttgtatggttagagaagagaatttgggaatcaagaagagggctggtctagcaaaggtattcgggacaatattgtgtgtgagtggagccttatggaaaaaccattggtttaggccaatcaagtattcactggagatatgctgagaaaatggaaggaactagctcttctggcaatcgaaacatgttcctaggccctttggtcgtaattcttagcacccttgttggggcagcatggttcataattcaagtaattaagcatcaatatatctttactagtctaacttttctctttaagagaatcattattatattcataaattttcagaaagacataagcaagacatttccagctccttacacgagcactggcttaatgtgtttcatggcaagctttcaatgcatgatcattgccgtgtgtgtcgaccacagggcctctgcttggtcactccacaatgctatgagactttcctctgctctttatgcggtaggtacattaattcattatgcaagcttctatgtatacatgtgtgtacattaaatacttacttactagttactactactagtatttttaattagccccgtcaaaaaattaaataatttcttataataaatatatgctaatgttggttccagggaatagtttgctctggattagcgtattgcctcatgtcgtggaccattgagagaaaaggtcctctttatgtctctatatttaaccctttgcagcttgtcctcactgccattttgagctgggctttgcttcgggagaaattatacgttggaacgtaagaaatcacgtgcactttagtatttacttacttatctataactaattaacaacatatatagttaatggatttagtgtcatatgattttgactcatatttttatttggtttatatatagtgccgtagggtctctcttgatagttttgggactctattctgtggggaaagagtgaagaggtgaaaaaggaagtcagtattgaagatgcagttaaggaagcagtcaagggttcgaagaatgacatggaattgcaatcatatgtgccatccaatggtaataatggtggtgttaatattgcatgaacaagggacgaggcagaatgagattcgtcgcaagatgctactagctaaggatcgagaaagtttcggctatttgtctttattttatttgtgctccctactagtaaatttgaattttgatatgtgtctaatcttgtgtcacatttgagaaagcgaagtggtccacaactctttggagttgcattgcagacatgtattattattattatttatatattaattaacccgcgcggtatcagttattccttcaatatgtatcataaatgttaaactatgatttcaatcggaatcagttattccatttctttaatacgattcgttataatattatagaactagctaaaatatggatacaaatggtctttgctagaatttaaatataacgcttttccttacaccacaactctcactctccaacatgctatgttctaaaaccagaagagaagatctgattcttgcgttagatcactacttccatattccccattatcaataattgggagactccaaaatctgttatgaaagtctgagttcactcttggccactcctcagacttatcacgcaacatccaaataacgaccatattaatttctctcttgtatggttccctttgtcccttgtttttgttttgtttctcgtctaatcactgtgtaacaagtttaactcctaggctataatctcatcttgtcacagttttgtgccaaagctcaacttaatattttgttcctaatgtggtcattcggataaaatacataatcagctacacgacagagtaaagataggaaaaagaaaatgctccaagtggttgtgttgtgtaagtttcatgtgccgacattgataacgcttttaacagttcacaacatcatgcaattggtttgcaagtagtaaatcactaaactagatctatctggctttaatttccatccgaattggattaaatatttcattaacatcaatattggtggacaatgtagaatcgaactactgttatcaacgaaagacaaaatattgagtgaatttatttaaattttttaaaaaaatttaaaatatgtttttttaagaaatagatatgattttttaaaataaacagaaaattaaattttatttaaataaatacacaaaaaatagaatgatacttattttattaaaataaatacttattttaataattattacttgattacgttattcgtttaaataaagaagaaagaataattataattaaagggtattacaccacatttaacaaatatttaaagaataatatatatgtctcatttcacaagtaggattaatcttttaaataatggattaaaaaataactgtgttctctccactaaaataatattgcactttggttggatgatgttaaccttgaacacctattacaggtaaggttcatgtctcaccttgaatgcatggtgcatgtctcatctattgagagcaagatgtcgtgagtgacccacctactgacctacctactcaaacacttggttataaaataaaaaatccagaagggcccgacttggaaaaaagtttgtcgttgaagtgagacaggtgagagtgagtgttgcggagatggacgtgtatatgcttgaggaagtagagaacatactaagctatgcattttgaagtaaaaagcttctagaagaagccctgactcactcctccttcatggacgctgtctcctacgagcgtcttgagttcgtgggagacccggttctgagtctcgcaatcagcaaccacttgtttctcgcttaccctcatctcgaccccggccagctctccctcctccgcgccgccaatattagcaccgagaagctcgcccgcgttaccgtccgcagcggcctccaccgctacgttcgccgcagccccccttccctcgtcgaccaggtcgagcgcttcgtcgacaccgtcaagctcgagaatcaccccgtcgctcacggcagatccgtcaaggcccccaaggtcctcgccgacatcgtccagtccgtcgccgccgcggtttacgtcgacgccaatttcgaccttcagaaactatgggtggtaccgtaccttttatcaattcatcatcacctttatgttagttgtattttagtttttctttccttccgcgccctccctttttctttgtggtatcacaggtcctcacacacactggtgcactcacacaaacacacaacaatctctctggtagaataattctgatgtatttagataatagtctgccaagccacactttggccttttacatgagacgctatttataagtaatacatgactcttcacttgagtaacttcttcatctagggacatgactttttacatgagtaacttcttcaccaaggacatgactttttacatgagtaacttcttcaccaagagacatgactcttcatatgagtaacttcttcaccaagggacatgactcttcacatatttaatttattattattaaagtttaatccaacaaaatccccccataaactttaaatatttcttccgtctttcatccctaacatattcttacaattttccagaagcaatgtcggtaatggcttcgtgaaaacatctctgacttgatctcagcttgccacatgaagtaactccaccttctttccttttacctgatcccgaatgaagtgaaatctgacgttgatatgcttgctcctttcgtgattgaccgagttcttagctaactcgattgctgacttattatttactcggatctcgattggactgtcttactttgatgggattaaacacacaatccccttctctgttgggagcaacacctcaaccaaccacaaacactggggagtcaccagactcaaccaacaatagctttacgtgggagaaaatcttcaaaaggaaaacccacatgacctagtccagaacaatccactattctcaataacaatggttacaatcactctcaacggccttcagccggagacactcaacctcaccaacaacaatggtggaaacgctctcaacaagggttgctctcaacctttcggagaatcactctcaacggccttcagccggagacactcaacctcaccaacaacaatggtagaaacgctctcaacaagggttgctttcaacctctcggagacgctctctcaacagcctcatgctggagacacaaacgagaattctctcctcccttttctggaattttgaatcctctcttccacactaagaatattacttttagatcgggcacgtaataaacatctcggatgcgcccaattcgtccatctttctgcaagaaacaaatcgtacctcggcctttgacatcaacctttgaagcatctccaaacgaaacatgtccgacttctatttgtctcagattactgaacaaatgcttatgcccacacatatgattgcttgcaccagtgtctagataccattccatctcggatcccttgttgacttcacttctagtcatcatcagaattcctccatctcttacttctccttctgtaacaaagtttgaagtttcatttcttctttcatctcggcaatccttcgcaaaatgtccgactcgaccacagttgtaacatttgtacgagttgcaatctctcgagtaatgtccatactttccgcatttaaaacattctacatttgattgatttgaatgtcggcctcttccacgacctcggcctcgccaattttgccgacttgattcagcctgctccttattccttccttcttgaccgcgacctttactatcgcgaccatctcctcgacctccatagccacgccctcttcctcggaaattgtgagaatagagcactttctcgtctttgattgaagcttttgtctggagtgcttgctccagtgactcttctttcttctttttctttctttgttcatgcgcctccaaggaaccagcaagttcgtcaacggtgagtgttgctaggtcctttgactcctcaatcgcacatacaacattctcgaagtcgtcagtgagagacctctgaattttctccaccactctggaatcggacaacacctctccatttctgtttagttgatttaccacggtctggacccgggtgatgaaaccggataccccttctccttccttcattttcattccttccaactctccacggagagtttgaagtcgaacctgtctgactcgattagcacccatgtagacatttgcaagtatgtcccacgcctcctttgaagttgttgcaccagcaatcttctcaaacccggaatcatcaacagcccagaataacatgtaaaacgcccttttgtctttcaacctcgtctccttcaatgtcttgttctgcgctaccgtatatcctactgtggatgttggttcctcgaaaccaccatggacaacctcctaactatcatgggctcccaaaagagctttcatctggatactccagttttcgtaattagcctttgtaaggcagggtggtgacagactactacttagcccatgctccattttctcaagctctgataccattttgtggtatcatagttcctcacacacactggtgcactcacacaaacatacaacaatctctctggtagaataattctgatgtatttagataatagtctgccaagccacactttggccttttacatgagacgctatttataagtaatacatgactcttcacttgagtaacttcttcatctagggacatgactttttacatgagtaacttcttcaccaagggacatgactcttcacatgagtaacttcttcaccaagagacatgactcttcatatgagtaacttcttcaccaagggacatgactcttcacatatttaatttattattattaaagtttaatccaacattctttcaccgccaatctattcttatatctcctcgtcatcacgtttctaaaaaatcagataaggttttaaggtttgtgcttgtgattgtggcagataatgaggggtgttttggagccaatagtgacaccggatgctttggagaaacagcctctaaaacaatcaagggaaccacatgcaagtgctgctgaggtgtttgttgcctcctcttcttctcaaaagcatcttgtaaagcttgaagctgccaagattggcttgagtaaactcccacatgtggtgccttccactaacatgaagctcctcaaatttactgctgatggaaatgataccttggttgttgaagcacccaaaaataaacttcgcgacatttgtgctgttaaaaaatggcctgtaccacactgcatgtactgttccttaacatgattttctttcagttcagttgcatgcgtgagtgaaacttttaatattccttgttgcatctctgtaatggctcacagcattgaaaaggattcaggtccccctcataacaggagatttgtctgcgcagttcagattccaactgctgatggtattcttcaaatgtcaggggatgaaatatcgcgggtgaaggatgcacaaaactctgctgcttcctcgatgattcgggccttacagctgggtgatttttcatcatttgaagaataccatcagctatattgtcccagtaatgaccataacataatatataaaataaaatttgaaataaaatttggagttatttagttggggaattttttttaataattatatacacttatatagagaagttttttatttttgaaatatatggtgttgaattcctctttcagttacaggctgaaaataaggaagaggaatggttgtggttcacattgacgacaattgatttcagcccactaacttagcaaacgtttcagaaaactgtccactgattaaacatgtcaataatcacctttgatggagaggggattataaaagggacgtgctcacctttcctggtccccaagcttgcttttgataattcacatacaccatctacgtgagaaaaagagagcttggaagcaccaagaaacacaggagatttgcagcaatcagagacattgcaatggcgggaggtattcctataatcctatttattccgcattgatctaattgctgttatggtttatgttaagcatgattagatcgtttctgtcttaaaatttctaacatttggtatcagagccacattacctctgtcttgcgttttattatggtcactttcttgaatttcttttctgttttatttcatttcaagattgtgattaagtctttttttgctgaatattgagtttggaaatcataaagaaataagatttcatgaacttctgtgttttaaaatttctttttggtgcaaaaataacagagataatgtttacccacatgcttttgctttaattgatttattttctgaggcaaaaataagacaaattgcacagagcatgagttgaactcaggtcacctatatactcctgtgtgtatttactaactgagctagtgttaaattcctgtcatatatttctgcaattattgtcttattctgacattgtatgctttctagtttacgtacaatattaaagatgaataatattttaatattgttgcccatggtttattgcaataatatgattctggaaattatttaatgtctagtggtctatatgatttaattaattatgaaatagccacagcttttttaattatttaaattatatattaagaacttctaaatcacataaagcatatgacattaaattgtaattgattttatgtaacataatgagttttatcccacaggaattcttattatgtttgtatgatcaattaggatagaatatcaacctatattcttaatttacccacagggattaggaaatataatttgatagttttatcataaagttatgtatgaatctaattgaattaaaattttagcccacaggtgaattttatgtcagtagattcataaatttttctagtctcaaaattaattataagcatgtatttctaatattttgcagtcgtacagcctgttaattttactgatgttcctgaattaagtggtaataactacaaggtttggaaggagaggattcttcttcatttaggttggatggatatagattatgctataagaaaggatgaaccaccgccaatcactgaaaatagtgaaccatatgatgttgacctttatgaaaaatggtagcgatccaatcgcttatgtgtcatgtttattaagacaaaattatctggtggcattcgtggttcagttgaacaacattctaatgtcaaatcacttatgaaagccattgatgaacaatttgaatcatcggaaaaggcattggcgagcacccttatcatgagattctcatccatgaggctcaatactgtgaaaggtgtgcgtgagcacataatggaaataagagatacagcggctcaattgaaaactcttgaggtagacatatcagaatcctttctagtgcattatatcttgaacaccctcccaatgcaatatggtccttgatgaactgttgaccatgtgtgtccaagaagaagggagattgcaaatggaaaagggagaaagttccttgatgacaattgatatgaatggacataagcaagccaagaaaaagtggaaaggtaaaataccacccaaggatagaatcaagaaggaagaatccaagtgcttcttttgtaagaagaagggacacatgaagaaagaatgtcctaaattccaacaatggcttgagaagaaaggtatgccaacctctcttgtttgttatgaatctaatatgattaatgttaatcataacacatggtggattgactctggttctacaatccatgtttctaataccttgcagggtatgcaaaacctaaggaagccagtgggaagtgaactaagcatctattcaggaaacaatatgagttcacctgtggaggctcttgggacctgcaatttagttttaagcagtggtttcattttgaaattagaaaagactttttatgttcctagtttttctaagaacttgattgcagtttcaagactcgtaccttttggttattccttttcttttgttgagacatctgtcaatttattttataaatctgatctgattgggaatggtacattacttgatggtcttttttatgttgatttacaaaatgatactacttatgatgctatgcatgttaatattggcatgaaacgatgtgttatgaatgaagattcctctagttatggcaccggagattaggacatatctccattcagagaattaagagattggtagatgatggagtacttagtactttggattttactgattttgaaacttgtgtgagctgcattaagggaaagcagacaaacaagtcaaagaaaggtgctaagaggagtaccgaactgttagagatcatacatacagatatttgttgtccagacatggatgcatatggtcaaaaatatttcatcacctttatagatgattactcacggtacatgtatctctacatgcttcataataagcatgaagcgttagatgcctttaaggtatttaaatatgaagtagagaagcaatgcaataagcaaattaagattgtgagatcagatagaggtggggaatactatggtagatacactgaaaatggacaagcacctggtccatttgcaaggtttcttgaagagcatgggatagtttcccaatacactatgcctggttctccaaatcagaatggtgtagcagaaagaagaaattgaactttattggacatggtgcgtagtatgcttagtagctccaagcttcctaagtctttgtggactgaagcacttaagacggctgcgtacatattgaaccgagttccaaccaaggcagtcccaaagacactgtttgagttatttaaaggttggaaaccaagtctgcgacatgtacgcgtttggggatgcccgtctgaagttagaatttataatccacaagaaaagaaacttgacccaaggaccattagtgggtattttattggatatgctgaaaggtctaagagatacagattttattgtccatctcacactactaggattgtggaatcaagaaatgctaaattccttgaaaatgacttgattagtgggagtgatcaaataaaagatcttgtttctgaggaagatcattcagacactcaaccttccacatcaagtattagattgtttgttgtcaacaacacccctacaattcattcaaatgttgtacaaccaatcattgagaatccacacccagttgctgatataagttcaatagatcaagttgttgatgaggaacaagaaattattgatcaacaatttgatcaacaagttcctcaagatagtgataatgcaacattaagaaaatctattagaataaggaaatcagcaatacctagtgattatattgtgtatctacaagaatctaactataatattggagtcaagaatgatcctgaaacattttcacaagccatgagttctaagaaatcaaacttgtggtatgatgctatgaaagatgagatgaattctatggcatcaaatggagtctgggatcttgttcagttgcctgatagtgtaaaagccattggatgtaaatgggtttttaaaacaaagaaaaactcattaggcaacattgagagatataaagcaagactcgttgccaaaggattcactcaaaaggaaggaattgactacaaggagacattttctcctgtatctaagaaagattctcttcgtattgttctagcattagttgcacaatttgatttagagctgcaacaaatggatgtgaagacagcttttcttaatggagaactagaggaagaggtttacatgaaacaaccagaaggtttttcctctagtgatggtgagaatttggtgtgcaaacttaagaaatctatttatggattgaaacaagcctcccgtcaatggtatttgaaatttcatgatgttatcacttcattcggttttgaggaaaacattgtggatcaatgtatataccagaaggtcagtgggagcaaggtttgtttccttattctatatgtggatgatattctacttgcagccaatgataagcgtttgctatatgaggtgaaacaattcctctctaaaaactttgatatgaaggatatgggtgatgcctcttttgttatcggcatcaagatatatagagacagacttcaaggtattcttggtttgtctcaagagacctatattaacaaagttttagacagaattcggatgaaagattgttcgtcgagtgtagctcctattgtaaagggtgacaggtttgacttagatcagtgtccgaagaataatcttgaacgggaacaaatgaagaacattccatatgcttcagctgttggaagccttatgtatgctcaggtttgcacaagacctgacattgcatttgttgttgggatgttaggaagatatcaaagtaatccaggtttaaaccactggaaagctgcaaagaaagttatgaggtaccttcaaggaatgaaggactacaagcttatgtttaaatgaactgataatctagaaataattggctactctgattcagactacgctggctgcattgattcaagaaagtcaacttcaggatatatctttatactagccgatggagttgtatcttggagaagtgcgaagcagtctttgactgctacttccactatggaagctgagttcgtatcttgttttgaggctacctcacatggtgtatggttgagaagtttcatttctgggcttagagttatggtttcgatttctaggccattgagaatatattgtgataattcagatgctgtttttatggctaagaataacaaaagtggtagtcgaagtaaacacatcgacgttaagtatttggccataagagaacgtgtgaaaaataaagcagtggttattgagcatattagcactgaattgatgatcgctgatcctttaactaaaggcatgccaccattaaaatttaaggatcatgtagttagaatgggacttggatccctcatgtaatttttcgttgtaagaacgatattaaatttgaaactcagttcatgatattttctcatttcagtttatgagcatatttattttgagaaatattaataaagtttggaccaagaataaatattgtatttattcattaagttatatgggcttgagaaacataatgcattgtaatacatgcatgataatactcaattttaagaggacttatcaccattattcatgtattttgtttcttactataacatatgttacagcatgtgaaccaattgggagaatgttgaattcctctttcagttacaggctaaaaataaggaagaggaatggttgtgtttcacattgatggtaattgatttcagcccactaacttagcaacgtttcagaaaactgcccactgattaaacatgttaataatcacctttgatggagaggggattataaaagggacctgctcacctttcctggtccccaagcttgcttttgataattcatatacaccatctacatgagaaagagagagcttagaagcaccaagaaacacaggagatttgcagcaatcagagacattgtaatggcgggaggtattcctataatcctatttattccgcattgatctaattgctattatggtttatgttaagcatgattagatcgtttttgtcttaaaatttctaacatatggctcattatgattttaatatttgcattcaattcttcattctgtctatacatgcccaactgaaaatcctatttgatgtatgtagaaaccccataaagtctttgttctcacgaccccgtcatatcatcggatcctcctccaccttgttgtgcaggaaccggattgactaatattatgaagcaactgctgtagtcatctcctagctgttgggtcttcctgaataaataaaaccaaaaccataaaaaaatgtaaacatcctaaaaccatgaataatctcttcataagaagaggagaaaaatctctagctcggaaatttgaagagagcgagctttacaagttaatgccctattgttaatcttcaattcacgtaatcaactcacttcaatcttattgattaaatcaaatttttatactaataatatcacttacacgaaggcaactactgaatgtagcatctcttaacacggctggaagacaggttcttaatgcatgacacaataaaaggtgataagaaataaagacacaataaaagtagtcaatatagtttttcgataaaattagtcaccaacaaattagatagatctatgtatgaaaaacatggtattaaaaaaatatgttaataaatatacatcaaatatggaaaaaatataacttaattaaaaaggaaatcaataattgttatattaatgaaataattatcaataataaacataataaaaaataaaaatacatgtgttgaaatttgtaattttgataaattttaaacatgaatttaattaataaaatattaatttttataagtatacataaaatgtgaaaatataaattaaaaagtaaagaatggttgttttattagtaataaatataaaataaattattaaatatatgtttaaaatttttaattttgaaataaaaagatttaatgttaattgaaaaaataaatattgatacggatagataaggaaatcaaaaaaatgaataagaaaaaaaatgatataaaaaaatatgttatgaaatgaaaaaggttgaaggggaaatatttagtgtaaacatttaagaataaaatatataaatttgagccatataaccttaaataattaagattaaaaattaattaatagtcacatgaagattttaatttttaataaattannnnnnnnnnnnnnnnnnnnnnnnnnnnnnnnnnnnnnnnnnnnnnnnnnnnnnnnnnnnnnnnnnnnnnnnnnnnnnnnnnnnnnnnnnnnnnnnnnnnnnnnnnnnnnnnnnnnnnnnnnnnnnnnnnnnnnnnnnnnnnnnnnnnnnnnnnnnnnnnnnnnnnnnnnnnnnnnnnnnnnnnnnnnnnnnnnnnnnnnnnnnnnnnnnnnnnnnnnnnnnnnnnnnnnnnnnnnnnnnnnnnnnnnnnnnnnnnnnnnnnnnnnnnnnnnnnnnnnnnnnnnnnnnnnnnnnnnnnnnnnnnnnnnnnnnnnnnnnnnnnnnnnnnnnnnnnnnnnnnnnnnnnnnnnnnnnnnnnnnnnnnnnnnnnnnnnnnnnnnnnnnnnnnnnnnnnnnnnnnnnnnnnnnnnnnnnnnnnnnnnnnnnnnnnnnnnnnnnnnnnnnnnnnnnnnnnnnnnnnnnnnnnnnnnnnnnnnnnnnnnnnnnnnnnnnnnnnnnnnnnnnnnnnnnnnnnnnnnnnnnnnnnnnnnnnnnnnnnnnnnnnnnnnnnnnnnnnnnnnnnnnnnnnnnnnnnnnnnnnnnnnnnnnnnnnnnnnnnnnnnnnnnnnnnnnnnnnnnnnnnnnnnnnnnnnnnnnnnnnnnnnnnnnnnnnnnnnnnnnnnnnnnnnnnnnnnnnnnnnnnnnnnnnnnnnnnnnnnnnnnnnnnnnnnnnnnnnnnnnnnnnnnnnnnnnnnnnnnnnnnnnnnnnnnnnnnnnnnnnnnnnnnnnnnnnnnnnnnnnnnnnnnnnnnnnnnnnnnnnnnnnnnnnnnnnnnnnnnnnnnnnnnnnnnnnnnnnnnnnnnnnnnnnnnnnnnnnnnnnnnnnnnnnnnnnnnnnnnnnnnnnnnnnnnnnnnnnnnnnnnnnnnnnnnnnnnnnnnnnnnnnnnnnnnnnnnnnnnnnnnnnnnnnnnnnnnnnnnnnnnnnnnnnnnnnnnnnnnnnnnnnnnnnnnnnnnnnnnnnnnnnnnnnnnnnnnnnnnnnnnnnnnnnnnnnnnnnnnnnnnnnnnnnnnnnnnnnnnnnnnnnnnnnnnnnnnnnnnnnnnnnnnnnnnnnnnnnnnnnnnnnnnnnnnnnnnnnnnnnnnnnnnnnnnnnnnnnnnnnnnnnnnnnnnnnnnnnnnnnnnnnnnnnnnnnnnnnnnnnnnnnnnnnnnnnnnnnnnnnnnnnnnnnnnnnnnnnnnnnnnnnnntttggataatacacataaggtcatagccgtaactaggttcaaactttaatatgatacacgcacacaaactcattacgaagaaatgatataatttcttaaacaaggagatagcaaaacacatttttttaattaattataatttaatgtaacatcttcatattaatttcctagtttttttcttattaaatactttttttctgttttgaaatattaaataaatttattatttaaaaattatttggaagactaattaaatatgtcataatagatatatcacttcttataaaatagagaagaaattaataaaaataacagataaaaaacataaataaattaagaagtgattttaatataaataaaaagatattaataatgacatatattaagaggtcgatatctctctctctctctctctctctctctctctatatatatatatatatatatatatatatatatattccccacaagcacaagtgaatgtctacttcattttttcaatcaaaaaatgcaatcatattattattgtatccaaaaaaaatcaaaaaacacattattgaggcaatatattcgacgcgtgctgtaatgctcatgcatagatactcacatacacacatatatatattaggcttttgcttctggctctggtttgttcttggctttgtttccctgcttgtgcttcaacatgaagaagctaatccacgtgaaaacctccaaaccaaatgcgatggtacccaacaaagcaagatttccaatgtatccccacttccatgcatctccaccttccaaaatggtaattcctttgaatatgtttatgaatatgatagccagcaatccataaccaagaaaatgatggtacatattccaatatttccggtaatcatccgtcaccttcggcttcaagcgaaaagccaacatctgaaaaccaaacacatatctttcatcaatgtatatcctaatagagattaattaatgcaataaataagaatgaaattaaatcagtttctttatttttccccccgttaaatctatatatgaataggatttagcgatgtaaatcgtaaatactatagaattataattgttggttagaaaattaatagtgggtgactaatttttttaacagataattcagcccttatattattttggtaatataatggtagaactatcgaatattcaataataaaaaaattcttatactaaatgcattttagaaaacaaaaaaattaactacatattttaaacttttaaaacagatgtggagcatatattaattaaatattttaaagctaaacccaattactaaggaatggatctacaacttaaccaagggtgaaagcacatgcttttgagggatatataatttaaattaaaaattaattattaaatctaaataggttccttttagtttatttttttctttaaaagtattttttaatctattatgattttctcttttaaaacatagacctttcatcatcatcatttaaaagtatgcttcttatattaattaattttaaaaattcttttaattccctttagacctatttatatattgatcccacacgtaccctaaacggactatccatctacaatctcctttatatatcaatataatctatattcgctttattagataattaaatagttttttatgatgatatttgatattgtaaaggtacatgatatataaaggaattgattacctggactgtgctaagggtgaaaatgagaatgccatagtttcgatgagtgtggaaggtgtagtatcttgaagaatggccgagacttaacccaatagcccatccagtggtgccaacgagaaaaccagttaattggcaaccaatgtgcaggttaaaccacattggctcccatttgaaaggaaacacccgaaagtaccttgcagttataattccaatcggcaacagtgttccccacccgataatgttcaggactccatgtacctaaattaatttcatgcacaaccataagtataaattaaatgtgcctctacaacacacaggaaagaaatcattctcttatgagactaatcctgttgtttatttcttatttgtgtaacaatgatcacctcgattgtataggtatatttaccagagtgattctattaggaaaagaaaaatgtatatcaatctaatacctaattaattagtagttagacatgtgggaagttaaatttgccattcttctataaacagaacaaattcaatattcttgaaaatatctagctatctttaaagttttttttttttttttttaattttaccagtttcacatgcctaattttcattggaatcctagtgaatctttgaatagttaatggtaacatgttgatccaaattcaattcaaacttctaaaatcaggttcaaatttgataaacacccaccagacttttttttagcctacattagatcatgatcgaattacactaaaggatatcaattttaattcagattcaaaatttaaaggtctccctacattttattgagtgaattcggcctaaccgagtttgagtcattccattttgccactctatgtgtaatgaacacttagcatacagaaacacttcaaaaaacttaatttaccaataaaataaagagaaattcttagatgcacctagaataagatatttttgttgctctgatccattcattatttgtcatgttagcattgtgggtcattgttgtttcctaattaatgacaatttttaatttttctaggtagattaatgacaatttttaatttttctatgtagatcgctgacatgacgaacaataaatggatcagaacaataaaatgtcttactccaggtgcccctaagaatttctctaaaataaaatataattcggatcaaagacaagtaagattggtaaatttactattgaaatgatgacatatgttcatgatcatttttttttttgaaccaggtatacctttgtcgaaagtcaaagaccatgaccatctttacctaagcattattaatcaaagaataataaaaaaaaaaaatagttctcgcgtaccgatctaagataactccggtactgtccagtgctgcgaccgtttttgtcagtcaagtctatgacctctgtgctgtcgacattccgaagagttgttggatgtttcaggggatgtccatcttcaatgtcaatcccaacttgccacacatggttcagcttcgtaacgttgtacacatcagaaggaaggaccaatgtagcatacatggtgttcatattagcgaccttttcaactgatttgttgttcacaaacgcgattttcgacggaagaaggctgcaaccgtgtctggtctctttggtgacgttgtatgtgtctactttccacgttccgtcgccatgtttaatggctatgatggctttggttccaatcatctcaggcctttttcccgggttcacaccccacgccatccacccttgtgagttggggagtgtggcacggaacataatttctagttctatggattcattggtgagactgtggtaggaccaagcaaactctgcccccagagtgcgcagtgtcttacaggctgagatgttcttttgttgggctagtttgaggaacgcttcactgcagggttgagcatcgtggccaagggcgaaggagagaaaagacagtactgtcaaaatggttaatggtaaggtgagtgaagatggcatgtttttttgttgtctcttcatgtgtttctttgtgttgggaaaatgtgatgcatagagagatcttatgaaggggttttctttcttctggatggtgtttaatacagtacagctagttgcgtcatgttttttacttgctgttgctgcagagtcacttttgctcttttttagtctctcaaagggattgattagtactggcatacttcccaaagaggataagaatttagaaacttcaaactcacgttcagaccgcaagtgcgtttttgttgatcacacgctttctttttgagaaatagtgtgctaaatttaacaaaggtgctaattaattactaactgtgcgaatcaattgttgcgaaattattttagcttaagtagttttgaatttgagacctgtatgtccagttagttaaatgcttagatagagactttgttgttcattatccggctcaagtatgattacctctagtttctaacaaaaacaattaattactttgcataaacaggtaatattaggggaatgtgaaaagagctgtgctacaggacccggattagagaaatgctttgtttgaactttggaatttttcggattttctttttattcaggcatctaaaaaataaaatagctattaaaagtggtaacatgtcaaaatccccatgtgtatatatatatatatatatatatatatatatatatagtatacatttgatctgaaactcagaacaatcgcagctgacacaaacatacgcccgctactgtttttttcttctgtaaatttagaataaaactaccaacatggcattatactaatgtaattatggaatttcttactgctgttatatatcttcgacttctcactcgtattctttaataagtaattgtaagttttttattagtgtttttttggtatatacttaactaagacagcatttcctctccttatgtataaaaagtatataaatcatagactctgcctatatacaaaagggtaaagagagtgtaacaactaacttcaagggattactcgagtaaggtaacacagggtttcacctaacgtgaatcacgtttaataagtcacaagtgagtctacctttagatcctaaaagtgttggccaccattcggaagagagctcgacaactcgtgtattctgctttaaaaaaggataaactaaatttacacaagttggaaaattatgcttacgtgacctgtaggaaattcccttcactttttgctattttacgtaagttctccaaagcaataacaacaaagttgttggtacttagtttgtcgttcttatattcattactttatgacgcagtcacatttgtttcatacttccatcgaaagtttgtgttgcaatacacagaagtaacccattattagtcccagtgaacacattatccatcaattcttaatgaaccatttttcatcaattttactatataaataattatagaaagatgggtaatatgtaaatgaaatttaccatgaccgtgacaaaaggtaaaaagactaatatatatggcaaaagggagattaggagaggacacttgaggaaccaatggtataacttatgcaaaaattatgaccagaaaactgagaagatgtagtgatggattcaacaataaaatgagcaaatgaaacttatattacaccacctcaatattatgaatctgcactctatcatttattatgttttggtatacattttatcaattttataagtgcacttgattttttttattattataatatgaatatgcacttttgtcatacattgtgttttgatactatttacaagtatggaatttgcactttattatacatttttatggaaatattatatatcttattggtttgatagtaataaataagtattttgttattattaagcagtttaaatatttattaattaccaaaattgttaaaatcatcggaatgtaatttagagacctaaatttaggtagccaatctggaaaacagatgtcacttttgtcacaatctacaaaatattttcatttaaagtattttaattaattttttcagcaaccaaaacttctatcgctgtatagttacagaaacggcaactaatagtattttctaaattggaattctaaataatttaaatgaaaattagaaactgaattagactgggccgttgtattagtcctaagacaagaaaggcgactaaacaacagcaagtcagcaacagactaatttataatagcgactgataaatatttgatcgctgatcgctaatggcacatcgcttggatttttgggactgtatcttttcaatagctgtttcagttgctgatataaatagcgaccgtttatctaataagtcgctaaatatcatttttcttcttgtgatttataattaatcattatattttgttaattaaatcattatttaatcattatgtttttgagtaattaaatcaatcgattgaatatgtttattaatcctataaatataacgaaatttagttttcttcataggttttttttttatggtttcaatcgtcataaatttatttatttttaaatactctttaatgataacattaattgtttaaattaatatctagttatcattaaatagaaatagggataatttttaaaaaattagacttaaatgcaattttggttcatctatttaaaaatagagatatttgattatcttattttaaaaaatctataattttggtcttttatttaaaaatgaataaagacattggtgctcatattttaaaaaaaatctacaattttaatcttcatattagcccttatcataagtcttgagctaaatcttttattcggaggacttaatttgtggtattttctgccaacaattttcaaacatcccagatgttaactttggttagctcattttgtctttatctatttttgacttttttaaccaaatctatttttgacgtagtaatcactaatcacttctttactattagctcagtattctcactaattagtaaaatgacatgcgaaactaaagcttggattctgcgttgttttttttttttttgttggtggattctgtagtttgtttccatgaatcctaaaccatatgctttgtgtgtatgaataaattttcttttaattttagtcacacaggttttactgataatagtaatccaaaaataggttctactgataataatatttcaattcacaatattattttaataattaaataactcagttaattgaattaaaaaaaataattcagttaattgagtcgcgagccagagccagagccatgcaatgggagtagctgatttcaaacctttatttcattaatcttactaattttgaatatcttattatttattttaagattttagaggataaaatggattttttaaactacgataccattcatttttgaattttaattcatgttttaaactctaaacttatgcagctgaaaacaaaagttcaaatgtaattatgaatgatgatgagattgagaaccacgtatagagaaaaaaatgtcttcaaaaacttaaaataaaaagcaacatttttcattttctaaatgtccatgccagaaagaaaaaataatgatatttatatatcttaatatataaatatgaaattgtaaaaataataataattaatttgatagtcagcctcttctcacactgatcgtgcattttcctagtccaagtcactgtaaaaaaacaaaaagacaaaaccccgaatccctccctctctctctccctctctcgttgctgaatgctttcatggagttcagacatcgaaattacagtgccgagcttgaatctcacgcgctccctcgcctacgcgccggagctcatcctctctctgctccacctccacctccacctctctcccaggtctttctcgtatcataatttctctcgcaattgttttttattcttttaaaacaattacgctaccttgctcgatcagtgcttgtgactatgcagaatcggtgttgcattcacggtttcggatgcaccacgaaatatatcagtttttttttttttattattgcgtagagttaggattcagttctatcatcctgaaataagaaaacgcctaggattttaatcattcagttaaattaaattctatcgatctttccctgtgtagatacctttatcctgtttgatatagtctaatgattcgatattgttgaaacgagtaatgtgagtgtaattagttctgtaaaatctgatgtaatctggataattattcaaacaatcatagtcatgaattgcatgccagtagtttatgtaacactgcaatagtgcactaagagttgaggaaaggaggggaggtcgggaaccaggaaggatttcgtaagtaactacaatttaggacttactaatttctgttgacttgcgtaatgaaaatatttgttgacctgcttaatgaaaatatatacaaaaaactgtggtcgtgtttattaggtggatttgtgacggtaaaattttacatatcttgcgcttttgacagtattcatttatttgttgatatgtttgttttaggtcaatgtcgtagatcgtgggaacactgatttctatgatccactaagaggaactaataataatgcaaatgctgcccctcctgatcatgacaacttgaatgaagctgctgatcatcagccaacaaaggagtggacctctttcaggagattactaacgcagaggtttcctgtctccaaaatggtttctgttgcttcagtaagttttacagtattttctttttcttgtttatgtaaatgttaaagatatactgcatataaaaataaataaaaatattgtggtatctaagatggctaagggcaaatacagttgctgcatatgatggaagcatgcattgttatgacactgtagattggctttgaacattcttaattgtcagtagtggtagatcaggttagatcatagatgtgaatttagatactgctggcaagttaagttcaaccagtgtgaatttggacattacctccttctgcaagggttattcattctttctgtgtctttgttttagctggctagggaaaggctggacatttttctgtttggaaaacagtagaactgtctgatactgttttattggtttccatgtgattaaaacatattttaatcggctgcattaacggatatcaatcgttaaatatttttaaggaagaggtgtattatctggcaggagcagacttgggaaagttgtgaatacgtgttgtgcttaaaaataaatattgactaagatatttctaaatattcaaccatttattaatacatctcatatttcaccttaggttccttcattattcttttttccacctctcagctataaagataatgaatcaagcttgggtatgggcattgttgtttatgattttgcattttaagggccctatgctagtcgccagataacactgctcatatgagctaaccttctgttgaaaaaagttcacaaactttgaaatattcttatgaagtgtaagatatagcagttaattactatatactaatatacatctgtaatttctattgtgcaatgttgattggtagaggataggtcttaaagtaagataggtaaataatcccttatattcttaaaccagttttgatcctttatctctaaccctttcagtttttattatatttatctaattatttattctttaaattacagatgcccgatgttttaatgagaagtggaaaatgtatgccaatatcttttacattgtttttccttttgttttatcctttatttatcttcacttagttatgtgacctcccaattttcagtacttgagaaatcttcaacaaatatgcacttggaggaattggacgatccacaaaaatttgctgatgagggtgtcaagacgattacttggcaggagtatgtttctcgactacatgaactcaaagatgaaattacttgttcctggcttgctgaagatcgagtgacatccttaaagttatcaataaaggtgaatttttatgtatttaatgatttcttttcaacattatagtttgtatgagtgcaatcaccttttggctttttaaatgaaaaaagagacatttttgttttagttattccatttagctggagagagagatggaaacaattgtgaaggtggggggttgagagggtgtcgagtaaattgttgaaggaatattgagtgggctgattgaagaagctcttcatcagaaaagtgggagagacctgggataatccctttttctgggataatatattttcccctatatcagatagtgtagggattgacaagccctttaaaatggatatgccattttgtgttttcttttcctcctgtactttctttactcttcgtaatatttatatgacagaatacaaatgttgtttaattttgtttaacaagattttagaatactaaggacttagagagatgggcctacccatttaaaatataactcatttttatacttagtttcggagtgggagtgaaatcatactgatttattttcatttcttgtctaagtttgtcttgattttgattgattatgagggctgaaactgattattctgtttgcaggttgctaagcttctgatggatacgtcagtattcgagttttatcctacactttttgttcttgtcacagatatcatggatatgcttgggaacctggtttggcaacgcataaagcggaaagctgagttttccgaagatggagctttacgctgcaacttagcaggtcctttgtcaatttgaaactcatcacaaaatgttgtttacttccataatctgtagttatataaatattacttattcaggttaagcttgtggcttgtctgagggcgctaatagtttttcaacattaaatctttttcatgctaatgttttgaagactaaggattctgtgttttaactgcaaaaaggttctcagtatctcaaacatcagaagccaccaaatatgtttcattttgtatcttgtatcttgtttattggaactaatttgtacatgtcatacaagcttgatgatctgcatgagataaatggacctcctttagaagtcacatcttttttcttaaatgttttatttgaatcttgtagaaaactttcaagcaagggatatttgtgctgatgcaaaagaaacttgctataactggttcaacaaaattggtgctgtgcaagagcttcttccacgcatgtgaagtccttatcctatgccctgtatttaatttattccttacatgttttttcccctgaagttatttttcttctctctgcttgtgttggttcgagactttctgatgccattttaatgtgatgtgacaactgataagcattttttttctgtcaatattgcttgaaaaagttgctacaatatagacatattttcagaaaagtttgaaagattttgtcaataacattttgaattttgacaagctgttgcactaaagattgtttctcactgactggtatttgctgactgtttatctgaaattgtactagttacttggagctggcaatattgccttgctggcggtttttgcttgaccaacctttagacagcctccgacgcttggtaatgatgataagaggattaggagatccagtagcatctgcgtattgccgtctttatatggctcactgtgctcagaatctgccttcacacgatataggtatttttgttgatattatatatctatccttagggtgtgtaaaaatgtaaacaagaagcagatggaccccttttaattgttaaaatacgatctgtatgtatttagatatattttggtctaacctttacatatgcaattgtttatcataatgctctaacacccttacgaactgtaatccaagaccttaatgtgaaatattatatactctttggtgtcagtacagtcacaaatactctggtttaaagttcttgtatttcttccataaatttccaaatttaaaagttgtttagaatgtgaaaagtcggctggttaacacattattgtaccagttattcagataaaacagaatcaatgaatctagattattgcttcatactctttcctatatgaaattttgtgctctannnnnnnnnnnnnnnnnnnnnnnnnnnnnnnnnnnnnnnnnnnnnnnnnntttctcatgtttattttcataaaacttatttcataaattgtgcaactggaacaggctatcttgttacatgtgtcaatgacatcagagttgttttgatgcaaatcttgtcagccaatgaaagaactcagaaaaatgttaaactcaacaaaaaattgcaagtcagtctgatggaaccaaccattgagtatattatgaagtgtatatttactgggttgtctcaggtatgtgatgaagtttctcttcaaaaatatacttgttttggatgtattatatatgatcatatttccatatatcttgttatacaaaagtgtataattgaaatttcattgattagtatgtttgctcttctattttgaattttccatgagcatttcaagggagtggaattgcaggttgaaatttcatgaaacaggcgtatgcacatataattagctaaatggttggggttcttctcattattataatgaaaactcaattcttatatcttaatcttcatgaagaattattgtcgttgttatcttttcaaaaactggacagtaggaaaaagaaagtcagtttgctaatgttttccctgcttttctcccctctatatcctatgttttatgctgatcaagtatgtctaactgtgctaaagagacaagtcaatgaagttttatcagagtttggattgatgaagaatcaacaggatttggggagtgtttcaatcattcttcatcatttactgaaggaactccctatagaagtagttagttctaatgtcgtgcagatccttcatctcattgaatttagcaaggataattcctttgatcaggtatacttttgcaatttctatcatagctggatacttcttgtacacattataaagtaccattttaccttattatagaggcatcttcgtttaagtttttcccatttgcggttttaatgttcttcttttttgtgatacagcatatgaattacagattgcttggattcaggctgtacgaaagaaaatcctctgttgatattgtcaatgctgtgttagataaagttattcaggtatttgtaaaattctagtccatcttgcatcctttcagagttacattattaggttctttgcaattgcatatattcttcttaaatcttcatctcttcatccatctacaccttgggggaaattgtgtattttctttgttgtttcctctcgtggtaaggtgataattgagggttgattctagccttctatgtaattaattgaaagctaaacaatcatatactcttccccttagcatattataaataatatataccttgacttgtttatacataaatctccccgattttaatttttaacataccagtaattcctcttatttatatcaagatattttttttggtaatttatccaacatctatgctctccactcctggtcaatttgaatatatgataatttttacctctataaaaaatgtgtgcaatttagtatggactatggacttcatttgtaagcatgttttcaactgtcattatttccttcaggtatttcatttgttctctaatttggctgcaactttaggttattgctctgtatgatagccttgacaaatacctgaaggttgtagatgcttatactgatcttattcttcagaatcagatggtaagttcaagtgagtgagtagaatcagactgttattagttctccatgtcttctgaaaaaggtttcttatgccattatgtatcttctttgttgggtcacttgggtgcactaaattgttgaccatttacatggtatagatgattttggctgaaatttatgcatttgtagtaatcatctttttatgtctatgactgttaaaatattaaatgttaaggtttagatattttttaactaacaatattgcttaaggaacagtggcactaattattcttgtaaagctgtgataaacaggtgttaaatgttaccatggcactgaaatttctatctgcttaaggcattggttttatggtgcacgtttgattaatttagtgagctcaataggattcatgttctaagccacacaactttcttttctggctatctatgcaattttaaatctacatcaatattaaaacttcttcaaaggttaagctaggctttaatgcagttcttatccttttgttgctaatttgataatcacagttgattgatattctataatcacatcctttcttctcacaataaattcttttaataaaattaaattaaaaaaagagatacaaaaggaagtaggagtaattgtaagtcttcagcaaggagaggtttgaggtttgaaactctttaggagcaactaatgcttgtcttgactaggcagttaacattatattacccaaatgttttctacaaggccaatgtttggcatttgtgtcgtcatcatctagatctacgcagtatatcgacatattatagttttgtaggttgagtgggtgtgctggcaagctttgttgcttcccagtaactcccatttgctaaatctcaggctttgaactttttaatttacaacttgcttgattccaatctcctagagattgaacatgctcctgaatgaagcttgatgtcccatattggaacaaattaatggcaaagtgtttttagcaagaaggtagtgaatttgattccttagtgctgaatgaattaccaataatacttgtcttgattaaatagtcaatagggtaagggtactgtgaactgaaatgataaggaagctaagtacaagccaatcccccaaaagtaacaagagatctataactaaaaattctggaactaagtttctaagcatttttgtgcaaggacaatagcctatcctcctttctttgcattctttctttctatctattggtatgttctttaagtacacaatcgttagtcaaacatatatatgacaatttaaagaaattccatagaaaatattgagatttaaactctggtccttgatggattaattgttatccaattacaaagtttagttgcaaattatatgcctgttactttcaaatgactagaatagtatttaatattttcttttgtaatctttcctctaaatacaattgtttatgccaggataaccatttgaaaatcattttggaaggcatttcaaagcgtacttggaatagaggagttacagaggatgaaatgctgagcttgcaatctcttgtggtgaagcttctgtctcattttaagcatctggaagatgtgttttctctggtatgttcctaatcatatcttgttgtacttgatcatctttctttttacgtctttctttatcactcattcttcaatacatgtgctataaatactagtggtgatttgggtttttgttgttattattttgtaggatcattttcctgaaatcttagatgtaatgtatggcaagtcacaggatgttgtctttttgcatatccttaatatggcgacaaggtaccatttatcacaaacattttgttttactctactcctttcattccatatcacccttattgacactcccatgtgacataccttggttctctagtcttagaattttgggtttgagcctaactaagtcttacaaaaccggctagtaaggtgagggtttccctccacttatttacattaacttgtccatatcactagtcgatgtgggactaaaccatcacccttgaggctgtaattcaggcagccctcaaagaggctgcaactgagatgggctaggggtgaccgcaattaaggtagttttccaacatctagtttgtatatgatatgtatgttcattgagagtttgaggaataagaatttttaacttttgttacttaattgagttgattgatatttgtgtacaaactctgtcatgaacaactaccataaatgattttatattacatctctaatatgcctccacatgccagaggctgtggggcttgaagtgtgaacattgcaagttcacttatcttgtgctgaaattcatttatttatttattagaattagtgtgacaaggatcaacttctagaccgcttggtcattagaggctttgatatcatatgatgaaccaactatacccaaaatttaagctattaggtgaagaaatgtgaatgattttatattaaaatttaacaaattcctttacttctgtggcaattaaaaaaaaaaacattttcttttgagttgtaaggccgtactgttgaataaatagagaggcagaggaggggagaggtgcaaaatagtaagagatgtgcaaaagagagggaaagtgatgtatgtcagaaagggggggagagagagagggaaaaggagaaaagaggcagaaaagaaagaggcgcaaaagagagataggagagagagggagggaggtgttgaagagaaagggagagacagagagaggtgtggaagagagagtggtgtcaaagagaaaaaaggagagagaggcatagatacgagagagggaggaaaagggagagaggtgcaacagtgatagagtgtgcactagagttttggggtgagagttttcaattttttttcattttgaaatcccttcattttaccagaaaaatatcctcaattttaaaattctttggatttgatatccaaacaagtaattttggcatatgatatttgaaatccactcaaaagttgagttcttctctctaagctcaccatccaaaattaggctgcattaaatacaccaaaattcctactaacattgtacaatttcatataaccattcatttctttcctctcctaaaacccctgtataggctgtacttgcacataaaagctgctgtaaagtgactgcactaacgtagataattgttatcacagaacttatacagacttacacttccaagtttactatcttagatctaattttgaaaaatacatcttatttgaacttctattttcttaaatcatgaactgctataaggctaagacattgagtcagctttgttaacattaaataaggtcattgaaacccaattaaaattgatgggatttttttctttcaaaaaagttccatgggaaattacatccagatcctgaatcaaaacttaaccatgtatccacaccacagagtttacttttgcattttcaaatgtttttgtttcataatatgctagctgcctgcaacatactcttgattctatctttctgattggtgagtataatttattaagtattcatttcattaccatggaattatgtgttattatttgttaagcaggaatggtcgcattagtgatccgacgagcatacagttgctttttgaaatttctctgacactacataataatatagagattatgaacgtaaaagatgatgatggccaagtggcatgttcaatagctcgctttgtgcacatggtaacctgttccttttgatattatttgtctctatggtcactttctttagttgtggtaatgtttttgccatgattatgaatgttgactctaaattgccttattcactaggtagattatggaacagagatggaaagccatttagcatttctggttgattgccgaggagcttttggtagattaaatgagcttaaggtttgtctttgtttttcttaaaagttgtggcaaaatgccctggtataagtgataaagttgtcatgctttcttgcaggaaactcttgttcactctagcaattctttagcaattcaagctttgaaatgtgataagaaacatctgagttttgtcaaatcctgtgtcacatttagtgaagtcacaataccttctatttctgctcacaggcagtttgatctttttctagaaactgcagaggtaggtatgtcagttcttgacacatcaaagttgtgtttatttttgctacttttatatttttcatggattcatagtttgaatttttcaggttgcattcttagggggcttggtttctcattcagatggattgattgattcagcgatcagctgtttgcataccttagacataattgatggttagttgacatgtaaaacctgtaaatttgttgctgatgcattgtgaaagtactaagaaccaatacttgaaattgaatccttgtaatttgttacttgtggcatgtctattttgtgaaatctattcaatgctaattttctatgtgctatgatgaaacggtagtggttaaaaggttttgagaacaattatcacaattcacaaccaaaacttgttcatgttgtccaaactataaattgttttatattttttagtgactcagttcagtcaattgtgttgaagaaagcccaataatttgggcattttttcttcttcatttttatccctnnnnnnnnnnnnnnnnnnnnnnnnnnnnnnnnnnnnnnnnnnnnnnnnnnnnnnnnnnnnnnnnnnnnnnnnnnnnnnnnnnnnnnnnnnnnnnnnnnnnnnnnnnnnnnnnnnnnnnnnnnnnnnnnnnnnnnnnnnnnnnnnnnnnnnnnnnnnnnnnnnnnnnnnnnnnnnnnnnnnnnnnnnnnnnnnnnnnnnnnnnnnnnnnnnnnnnnnnnnnnnnnnnnnnnnnnnnnnnnnnnnnnnnnnnnnnnnnnnnnnnnnnnnnnnnnnnnnnnnnnnnnnnnnnnnnnnnnnnnnnnnnnnnnnnnnnnnnnnnnnnnnnnnnnnnnnnnnnnnnnnnnnnnnnnnnnnnnnnnnnnnnnnnnnnnnnnnnnnnnnnnnnnnnnnnnnnnnnnnnnnnnnnnnnnnnnnnnnnnnnnnnnnnnnnnnnnnnnnnnnnnnnnnnnnnnnnnnnnnnnnnnnnnnnnnnnnnnnnntatacgaactgaaatggatagagacattcagtggtaaattatgttatcatttggctaataatatcatattaactgaaatggatagagacattccgtggtaaattatgttatcatttggctaataatatcatattaactgaaatggaaattttttggagtgccaaactttagggtcattttccctatattattgttacccaaggcttctaatgcgtaaaagttagaacttaaaaaggaaatgtgtttaaacaacactaatctcttcttgaatacaagtatcctagcaatagttcttagaaataactaatataaaattggatgctacaatattacctgccatttttttgcgaggggtttttattgagcatcattctctctggtcttttggttgcttgtatcagcatttttttgttcttaatgtatttaaaatacattaattgtgccaccatggctttctaaaaaatgacttttgtttgtactctagatagcattcttataatataattgactgttgatttgctcgattttgtaggcttccgaactccaactgatgttgaaggactagtttcatctattagaaagctatgtggcttcttaattatggttccaggttgtaaatattgtttcagctttgcacattaatatacatagacactataaaatctctctttctgggatgtatttactatgatttgtatagaaatatataggtactaggttagagatctagttcctttttacctcttccttgtatgcatgtattcactatgattttcttcaactttattgaaggtactcttaatctaccagtcacctatttcccaaatagcttatttagattgatcagctcccgatcttggtaagttttctttgggatatatcacaatcgaagcttcttgccccccagaatacttcccttattgttttagtctctcttctcccttcctgcatcttgttcaatgaatgaattgaaaacccttgcaggtttgaaccaaaaatgaggacacaaattttttctgctatcatattattattgacaactttatcacaaaagagactgccatatcatgcaaattcacaggtataagtggtatagctttgcatttcctcttttcaattgcattaatggaataaagatgacatatctactctttcactccaaaatggacaaaacatattgaagtttgttgaagagtatttagagaagtcttgcttcttgttttgtgtccaagtagtggatgtaagtgtcatttagtggtcatagctccagtataagtaaaggtctagggttaagctaatgtagtataattattctgagcctgttagtgaatctaatttgccttccctttactttgcactgactataacaagtgtaaggtttacggttttgtaaatcaaggtgttcctgacatgttatggtttatggtttttgtatcttaattctcaaaacaatatatttttttcctttccagattccaggcaatgacatgttatactatgaggattcatcgtacaaccaagagcttgtttctttgtctaaacttgttcttgaaaacctgcttagtgccgttcaacaagaaccttcccaggtatcatcattttggctgaattaatagtgtttgatttatttaaccaattataataatactgatttattataataaaataaaggctgctcgaggaattatggcacttgaagcttgcaattgcattgcatcatctttcatggtaagctgctctgtagttgttttgaacttagttctcaccatcatattgacgtggggagaaagtacaaaggaaaaaaagaggtctcagattacaatttataaattctagaaaaacattacaaaactatttccaatttaggcatcctaccctggcaaatgggtatttaaatcaccaggcagttaacccattaactggtttgtagtgtgtctgtatgtatatatatggtctctgccccggcatccccatgagattaatcccattcatggtaatcatttaatatttctttaactataaacagaaatttatgaataaacattgttcactatacctatataatatagtttggagcattttgttataaaaggtaggcaaatgaaatgtccttgttcctgtcagaaaccgattcagtatataattataaaggaaaggatgaatttttattgatgaaccctaaatcccaattgctgtgccaatgtggtagcagcctttggctaggttttgaagatacaaaacgaactatttccctggatattcaagattcaaattatcctttctcaaatgataagatgatttctctcaacctcccctctttatttaatatttataggcaatatgccttttttgtttcactatggcggccctggtagcccacccaactaacctaccccactccctcactaatagacacctaactaactactaaatgaaatacgtgtttgcttcatttctcaggttcaacaaaattgttctgtttcacccttgtatggccttatgggtgaaatatatctttaaggtttaaatatgtttttcagtccctacaaatacgatggattttaaaatggtctctattatcatttaaggatggcctgacatgcatctatgcattccacaacagtgatcactttctcaatacatttgttatcaataaatggtaacaggaatcaatcattttcaaaactcttaaaattcataagggccaaaacttataattttttagggattaaaatctaattttgtcatatttgttggattaacaaacatattaaacctatctttaataatcccccaccccgctaaatcctaatgattgaatggaacagaaaaaggaagtcagaatatgcgttttcttatgagtccccatgataatgttctgttgtaattcgtaacattttcttgtttgaattattcatttttagcatagccttacctagtattatgttaggggatcaatccttgttgaaagttatcatactctgttgtaacttgtaaccacaaattccaaatgaatttggttgcttggaacttgcagagttgtatctgaatcatgtgcagattctacttcagctttctaataatggtttctttcttgattgttgacagctaagcaatgagttgttgtctgcttgccttacactggtcgaaactgccaagtcatgtttgagtgccaaagacagatacctccagtcaaccattcaacttttaaacaagcaatcgccaacttctgtagggactatggtgtctacttttgtgtgatttgtgttcacctatttatttttctgttttttttttctttgaaaatgttatttctccgtgtgggtaaggaacgagcttttctctttccctccctcttatttctctttattttgaacgagggggcttatttgttgcaaatttattatttctttttctttcctctaggaatcaaatttattacttctaaatatcgtgaacgaactaaaaacggggcataaagttaaattttctacagtatactattgaccttagtattttcctcctaactgaatagttaaactaattttggctagcataactgcatctaacaaaattatgacggattgagttcacttcattaattctccaaagtacctttaattcagtgaaaacattcagttactgatgacgatccccttttgaaagcatacagttcttgttccaaatacacgaaacaaaagtaccatgtgaaaaacatggcgacttcttgcgtggcgtacccctaatgggtatacatgatgcgaatactacttttagaatgggttgcacggtgcgtgtatattacaccgttagatcttgaaataaatgagactactgtaggaactatctacattagatttttctctctattttgcgaaatacccttcttcttcggtcccctcctctcccctccatcactccatcatcattcttccgcacagccaaataaataaataaaaccaccatccataaacaaaaattaaactctgatcttcggattcaaatctataataacatgcattttcttatgaatatagcgtacaacattcagatctaagaaaccaatacaaaaaatcagcaacaatacataaaacaagtctttacgataaatgagaatcaaaacttaaatactaattaaataaaaaaagcgtcagatctgccgctgaaatcgcaccgaaaaaactccaaagttgtggtcagtggcaacgcaagatcttccatggtcataaccgcctcaccactctcttctctttaaatcttaacggtaaaaaaaaaaaaaaaaaatcacaaggtacaaccattttaaaacattcttgttcgcaccgtgcgtaccatgtagagggtatgcacgttagccatagtcgagaaacattcaaggtcttgccatacttggatttctgatgtaaatcacattttgtcagatcgaggcagagactaagcaagcaatccaataatcaatcagattgttgcatcactccttgagcttcaaagtgtggatcaaaagaattcatagtttctttctttttatcagaccaatttgtatttattgttcgacattaaagatctagcgtcacattatcgtagtagaacttttgtttggatgaatatggtagttagtcgtttgattttggctagaatttgctgattagtcactcagacgatagatttctattgaagctaatgtcaaagttttgaggcttttggttataagaattactcgatgtgcaatggagttctcgttgaaaagctttgatactatctaaataagcagaacgaactcaaaatgaggtatatttgctcaactagagatggcaatgggggtggcattgctcggggacagatttgcctctccgttctcgcaaaatgcgatattatcatcgtagataacctgttacactctttttataattttaatttacttatatatttataaataaattatatattaaaattttaattatattttaattcaaataatatacaaatataataaataaaagataaaaaaaaaaaagaattcaattattttttatttaactattaagctaattgatttatatttttgaaaattataacaataaaatctttataaaattagtaatattatgtatatatatgttgtgacaaaaaattataaaaaaaaaatataatagtgacacgtacggtataatttgatattcttttttactttaagaaattgagtagtacctaattaaagtaggtattcttcatcaaagtcaatataagtttgggagaatactcacaaggttatttgttatgtctactcagtagtgattaagtgcacaccattttgtaatatgactaatatagtaatattactaattttaaataattttttatggttttatccttgatttgtattcgggaaacatgatttctggaaaagtaaatttcataaaataatgatttgtgtgaatgtgtatttggttagtcttaatatattttttgataattaaatatttatgtaaaatatgtagctaaaactttttttacattcaaaaaattagattcctgtccctcaccttaagaatgtgttttgacatgaaagtgaactaaattaattcttaaaaaccataattttctgacaatttttttttattaatcgtatcctaaacataaaaatcataatttcctactttataatttatgaaaaaatcgtttatcaaacttggctcgcgctaaataaattggcatggtagtagtgtggacaaaactcaacatcttggtggcagtggcactacttaagtagttttggttatagttgacctccgaaaactctatctgactgtagagttctcgaattctgatatttgattaaaactaactacatcagtttcatagtcagaatagctacattaagagagactaaactaattattagaattgaacttaaatatactgatgagagtgtaaaagttttatacacattgtatttttgaagcagaatatacacattgttattaattattaattatttcagaaagccgacaataaattcatttacgaatgggccaacggcccaaagctccagctaaaacccgggccctgtgcatagatgtagccggtagggcacattccgacgggtcattatccaaaattcgttcattcataattttcaaatcccatagcgacaaacaaataatcatcatcgttttcatattttagagagagagagattgtgcgttttgataatcaaccaagttgcagaagcgatggatctggaggtggcagggcggcacgcgatgctgttcgacgacgacggcatggcggcgttcgtgaactcagcggaagctctggtcgaatggaactctctttccatcgaccgctacgatgtccgccaccttctctccgctcccctccccccgcgcctcaagcgccgccctcctccgccggaacctgatctcgatcaccaacgctatctcgacctcccttcctcttctcccgacgacgaacagccacaaggtaacctcatacacaattcctctatactttttactttctagttccttccctttcttatggttgattttcccccaaatatttttctgttttatttggaactctgttggttgttgtgttttatgttttcaccacgagaagctatgggagctttggttagtgattttgttttgatgaggttttatgttcttccctggagagaagttgggaagttttgttagtgttcaaggttaatcctaattttatataggccacggtgagaaaaagtcaatcaaatggaagttgttctgtttaattaggttcgaggaagtccttaaactttgggagtgaaactatgggttttgattgagctcagcggtttaagataaagcttttgttgcttatttgtgggctttagctagaatgtttccttgcatgatgaaaggtctgcaatgaacatattctggtttaacaaaaaagcttgccttcgtaatctttattattgtaacaatgaggactttgatattttgagttgtgacatattgtgatgtgtgtatagagcaagggctattaataatcagtcgcgggtaattctctaaggtttgtctatcaagtgtgttcaattttttctcatcattttgacacattgatatatttggttagacatgacatttagttggggcaactagttgatcgtgggttctttgttggctaatggctagcaaaacacatgttttttccgtgcatgttggaacaatccaacttccacttgagtctatgtcagagtgttttttttttttttttttttnnnnnnnnnnnnnnnnnnnnnnnnnnnnnnnnnnnnnnnnnnnnnnnnnnnnnnnnnnnnnnnnnnnnnnnnnnnnnnnnnnnnnnnnnnnnnnnnnnnnnnnnnnnnnnnnnnnnnnnnnnnnnnnnnnnnnnnnnnnnnnnnnnnnnnnnnnnnnnnnnnnnnnnnnnnnnnnnnnnnnnnnnnnnnnnnnnnnnnnnnnnnnnnnnnnnnnnnnnnnnnnnnnnnnnnnnnnnnnnnnnnnnnnnnnnnnnnnnnnnnnnnnnnnnnnnnnnnnnnnnnnnnnnnnnnnnnnnnnnnnnnnnnnnnnnnnnnnnnnnnnnnnnnnnnnnnnnnnnnnnnnnnnnnnnnnnnnnnnnnnnnnnnnnnnnnnnnnntttttttccggcaacatcaagctccacatttgcaggttggaatttaatttgctacggttcccgtgtctgaatacaagtaaggatgttttcacctggcttcaatttaagtttggcgttgtgttgcaactactgtttttgctggatggttttgttgttattgagaattatattatatctgattctgatgaagaatatcacctttttgtgtttagattatggttcagatccagtgagttcaactggctttcatgctgtcgccttttcatatggaaattctaatgtgtccacggagacaaaggacaatgatgctgagtctagttttcatcctaaattcccagtaccagaaagcctactcaataacctggtgagtaagagtaacctctgtcttaatatatactttaaattgtgtggttttccgatgttactaatttaattgacctttcattgtttaaccaatgtgattaggtgataattgtctagggtacatatgttattctaaggcttacaatgtctaagtttcagatgctcggagcataaacggagttcttgtgactcaaggtagccattcacaggcaccttgattccttttgatgtcatgagaaggggccgtgcaggtgggattaggatgatagaaatttgttgattccttacctcttgagagcaaatggaatgatacatgtcttcataaagttctgtttcttgatctttatcattatcaaagtatttgtgaggttgtcttgtgtttgtttagtaagatacaagtgtctaaatattctgcttggctagaccctttttaagtttatacttgtactaattttggaattcacatttattgatgacgaaacatttttttgtttgtttgtttttcttttcaagcctccaaatgagaaagtacatcagattatttcaaggactgcaacatttgtcagcaaacatggaagccagtcagaaatcattctgagggtgaaacaaggagacaatccaacttttggattcctgatgcctgatcatcatcttcatgcgtattttaggtttctcgttgatcaccaagaacttctgaaagttgacaaagatgatggaagctcaactgaggacatgaataggactcaggggcttgatcaaacaggtggtgcattgtctttgcttggatctgtctatggatccggagaggacgaggatggtacaactgagaatacttgtgatgttgagaaaaaagaatgtgagggagctgttgatgctgctagtaattatacttctccaggaatagatcaggcagaatcttattcagatgtggccaagaaggatggaagcatttctaaaaatccaataccctctttgaaagaaaaagttcctgtcataaagcggaatcattctatcggtactgttaagactgtaaccacagctagagctaaaggtgatggcttggattcagtatctaatgcacagaacaagtcgcaaacttctgtgacgagtactgctaagattgaactcccagttgttgaacctccatctgatttaaagagagctatagagaagatagttgagttcatcttaaaaaatggaaaacaatttgaggctgttctggcagaacaggatcgacctcatggaaggttcccatttcttctgccatctaatcgatatcatacttactatctgaaagttcttcaaactgctgaagaggtgtgtttctcagaattattaaatttagcttatttttaattttcaattaatgtgattcaaattgttccctgagaagtgagaaattagctgcacttgcactttactaccttgtaggatgtgagccatgtcactcaagattgaatgccttctaccctactcttccctcccctctaaaacaaaaacataatttaattgactgatattatcacctgtaaacttatctgcagtactctaatgttggttattctaattaatcattggtcatgtttgtatttctgtctgttatgcaaatttgtatgcatgtggcatatatgctttatatagctataatgccttgccatgtagttgtgataaattatgaatttttgaagcagtcatggttatttttattcaacttcgcctttcaaagattttccttctccatggaattcaaattttggtaattattttatttgggttctggagggattttttgcaccttgtattccatgaattatttgggactgattaaggtagtgttaattttgactttgagctgctacttactgatcttcctaattgtttgtagtctaagttactaggcaagggccaccagaagcacaatccagcaggtcgtacaggggacaataaaactgctgtacatgaagatagtgacaatctttcacatggatctatggcttctgatctaccatatgacatggaccgaaaagaaaagttcaagatgattattggcaaggctaagaaggatgatcaaggtccaattccaaaagaccaagctcaaaacacaattagcatggatgcagcagcaactgcagctattcttcaggctgccactaggggtattaaaactccccatttggaagttcttaacaagacatcaagcggtagtggtcaaggccttggaagtgatggtgggtatttgtccagctctgggactggtagtctgtattcatttcaaccacaaggttttgttgaaagtcaaaacctgaatgtaaaggcaaaggctagtgcttctgaccctgttgccaaggctattgcagaaaaagtagctattgcagcagcaggtgaggcggactcctctgaagttcacatgactaaagagcaaaagcttaaggcagagagattgaaacgagcaaagatgtttgcagccatgcttaaaagtggtgttggagcaagtgaactgccacgagctttatcagttgagccaccaggctctggagtttcaggttcagatgctgagactgggaatcttgttggtaaagaaagggagggaagttctgttccatttgatgttgataattcagataaaagtcaaaagtctgaggagaagctttctattgataataattcagataaaagtcagaaatctaaggagaaacttactgttgatgataatgaacgccggtcaaaaagaaagtaccgctcaagatctagtagacatgaagaggaggaagaagaagaaaacaaagaagatagaagggatcataaacgatccaggaaaaaacatcgctcacatcgtgcttcacaccacaatcgggacaggcataagcacaagagaagacattcctcctccgaagacaagtattcttacaggggaaccaagcacgatagctcctcttctgatgatgaacatcatcgcccaaggcatcgtcgtcataaatatgataggtcctctgatgaaaagcaccactcttccaaacaacgacatagggatgagaacttgtcagaccatgagcatagacattcttgccattctaatgaagattatagttcgtctgatgatgagcataggcatcgaagcagaagtgtagggcataagagcagatctcatgctgaaagagaaagagagctggaggagggggagataattatgaaatcggaaaagtcagtagtaagtggtgaagttggacgtgctagtagggaggcttctgagggattatctaatgcaagggcaccatctcaatcacctgaaataactgatgtttctgatgagcttagagccaaaattcgagccatgttgatggctaacttgtaaaagctatatggggctgacaataattgtattgctttaacttctttggtaatatcatagtccattgctccaacggaaacatcctgaatttttcgtaataataaaataataatatttagagtagtctactaaaattaaaagaaacggttaggtaaaaattaatagtaaacgtgcaaaatttgaattttttttttcttttgcaaattacgataacgtataaattttatgattaagatggtatggtaaaagtaagtattgaaacaagtaatataattacaggaaaatatattgattataaattagttaaattggaatattaaaaccatataatgaactataatatttttagtaaataagtttttagcattcctatttatgttcaaatcactaaaataaaacaaatatataccagtacttggttgatctctttcttctgttttgtcttttctatttttattttctcaatcaaatacaacattaaggaattatgtaatgtcggacatatttcatgtggcaaaaaaattgatatatttcaaacaaaatattataatctcgtgagtaaattattaggatttttggaagaaaaaaaaaactaaaattctggaaacttaggacagtttaaaaatttaagacctagactcatttttaaaatatttatcttattattttactcaaagtattatgatatattataacttaataaatagttagttatttggcgggcattaaactatgcaaacgacatcgtatgggaacactatataattcctccgttgtccagaaccctagctttactttaactctcactaacatttgtagcttcacacgccgccgcgcacatcgcagtcctcactctcccggaaaaccctcatcagcgcatcgaatatttgcaatctccaatagttctctttatctcttcaccataaaaatgtgtgaatccgtggaaactgaagaaaggcccaaattccaagatattagacgctatttctgcgagtactgcggtatctgcaggtccaaaaaaacccttatcacctcccacatcaattcgcaccacaaggtacccttctttctaattctgcaaaatccaaccgtttataagcaaccctgattgaattagatcaatatgtagggttatgtgtggttttgttgtttacttttgatgtgtttttaggaagaggatgaaaaagcaagagctgaaagaggtcctgaaggaaaggcttcgaaatccaacacttgcgaggaatgtggtgccactttcaaaaaacaagcccatttgttgcagcacatgctaagtcattcaaatgaggtatttggactcttcaattaaatattgttattatttaagaaaaaacatagattcagttaagtgaaactcttaaactaagtatgttttatagaccgtcgtgttccttgagaaacattttatttgtggaagacaggcttggtgttgtgaattggttgtgttacttgttgtatatagactgaaaatacatattttgcaggatagtaatctataagattctaaaatcattggaaaattatggattaatagtgtgaagcattggatcccagagaaagaactccaaaatgcacgaggcagcgtatatgaacttgatggattagtatcaggtagggagacctcctgtgaagctccatcaaggatgcctcggtcacgctctgttcgaaattgaggttggcagtttgtttatttgtgttttattcttgtcagagcatcatgatacctttatgtgtgtaagtttttggatttaacagtattttccaatggttacagaggccatttgtgtgtcctgtcgatgattgtcaggcaagttacagaaggaaggaccacctgattcggcaccttcttcagcatgaaggaaagaattttaagtgccctgttgagaattgcaacagtgagttctctttgcaaagcaatatgaaaagacacattgaggagattcatgacgacagttctacctctactaatgacaaaagtcataaacagcatacatgtcccgaggttgggtgtggaaaggtttttagatatgcatcacagctacaaaaacatgaagattctcatggtaggttttgttccttttgtaattctttgagttagttaaatttccatgggatgtttgtaaggttcttgtttatttagattagtgaaagatgttgggtgcaattttgaagaaagcctttattctgcagttaagttggagtcagtagatgtggtgtgcttagagcctagttgcatgaaacatttcgctaatgtccagtgccttcaagcccatgtgaagtcctcccatcaatatatgacctgtgacatttgtgggactaagcaactgaagaagaatattaagcgtcaccttcgatcacatgaagtcgaaggcaattcatcagagacctttcaatgtgagtttaagggttgcagctgcacattctcaagagtaagactcctcattcttaaatctaatcagagtatactataattgagttctctgtttggttacaagttgaactttcttttaatttgttcatggttttatgttaacagaaatctaatcttgataagcataagaaggttgtgcactttaatgaaaggccttttgcttgtggttttcctgattgtggcatgagatttgcttacaaacatgtacgagataatcacgaaaaaacttccaaacatgtttttacccttgtaagttcttttccccttctattccctttgtgcaaaaggttttcttataagtgatattgtcatagccttttcattgacttgctcataattttccttgcttcagggggattttgaagaagctgatgaagagttcaggtcaaggcccaggggaggaaggaagagaacatgtcccactgttgaaatgttaattaggaagagggttaccccacctagtcaattggagcattggttatttatgcaggatggtgagtagagtgcatttaatattgtgtgctcctaaatatacaagtaggcagaatgtaaatttaatatgttgacatgagtatataatataattatgtgcatttaggattagtaattagtgttaacagagatatatagtatttatttaggagaacaacgtgtagtaaactagtaatgatgtatgcttatatatgacactatgacagattcaatagtgtagtgaatctatcaactgtcgtaccaatttgcaattcaaacaattacttgtttataatctggtttggaaggtgatgtatgctctcatcggcatttgctttattggctgtttgaattggttgaaggatatgaaaagcaaaggaacataatggaataagagttttttattttatttagaaattttatggtaaaacgaaacacttcttattttatacacaaattatgttttttgaattctggcttaatgtcctgtagtttgtacaaatacttttgataagttaaaagcgtactattaattaaaagaacccttaacgttaagcataaaaggaaaaggcgtgttataaaaaatgtcacttaactggcaaccaaaattatctattcccttgtttaatatataatatttaactccttgatttgcatttttctacatggttgactttaatgtattgtttcaaaatcataattttttttttctttctaaatcactattaacgttttgtaaaagctgttgcatttttttaataaaataaaacaactctacccaataaagataacaataaatggttggaaaagtcaacgctggacatcttttgttatggaatacggatggtccttactcagttactgtaatgaaaatatcaattgtcttgacaaggcgataacattacacacttagttgaggatctttgagttaaagtgtcctctagagagttgaaacttagaaacatgtaaaataaaaaataatttcgaatttcaatggattgacccattatttttcccattttttcatagaagattttttatttatttatttatctttgttattaataattatacatatacactttcattatattatccaaaagtgctcatagatagatcggtccaatctaaataaaactgaaaaagcaaaactaataaatcgaataaactaaaaattaaacaaatgaaaaacgaaaaaactaatttttttaattgaattaaaccagatttcagttttggttttcaatattgatgcaatccaaactaaacttttatatatttannnnnnnnnnnnnnnnnnnnnnnnnnnnnnnnnnnnnnnnnnnnnnnnnnnnnnnnnnnnnnnnnnnnnnnnnnnnnnnnnnnnnnnnnnnnnnnnnnnnnnnnnnnnnnnnnnnnnnnnnnnnnnnacacaaatatatatttcattgttataaatactattttaaaaaataaaataaaataaaataaattattcaattcgtttatatatatatatatatatatataattatataattgttaatctttaaatagtaaattacatatagtggaacatttcaagccctagtaaatagtaattagtctaagtcagagtctctctcattgccattcatatcgtttctcctttagaaatcagccacgtgggcatcttacctcagttctgaaatcttttcttggtatatattctcacacataatatttggttttagtcaaaacccattttttgttgccgactcccttgcatctctctatctctgacatctaccccttctaactcctttccttcaccctttaaataatttgtagacacaactacgtgagtcctttttgatactcatgcaaaaactttctcgctccccaagcacactacttaacataatagggagtgtgtatatatatatatatatatatatatatatatatatatatatacatatacgtaaatatacatataatcaacatggaacccacttggaatgatcccattgtgaacggtagtaattcttctgatccagtaatgtcgtttagaaggacaccacttgtcattgatgagcttgattttgcatagaagagaaaggagagtgaagatgatgatattgatcatgatcatcaaagtgtggaggaccttcatgttgatgtatgtactatatatgtagccaaactcacatttaaatatttccttagacttaataattgtaattttaccttaattatatatatgggcacctaattatgttcttgttgtgttaatttatagaccagctcagatcttctgacgaagattgatactggtgtcaactaaagaagatgcggcattggaaactatggacgataagagctacgaggtaccctaattagtttttgtgtctaggtatatatgttatatatgtttgatttatatttatcaaaaaggtagcacgtttaagatgaatatatagtaattaatattaatttattcctatgggtatagtttgtagctttgctaactgaattggaccaaatgaatgctgaaaatcaagttttaagagtgttggttgatgaggtgaacaataactgcaatgccctacgcatgcaaattgtcaagctaacgcagaagcagcatagccatggggtaatttatttatttgtttttataacattgaatatcaaataacttaataaataagtagtggtatatttgagtttacttgatagatccatcttaataaatttattgagttccaaaaaataaatctggcatttgatcatatattcaatgctgaaaacatgtatgcacttgttttttatttggttttgtgtagaattacggagtgatagggaaaatggaagatatggttccaaagtcattctaagacatggatgttgctgacgaggatgagcctaatacccagcaatctttagagggaaaactgacaggaagcaaaagcatggttgagttgggacagggcaaagatattgctgttttggagacagataagttggattctgctggaagggaaagtgcaaaagctagaattcatggaagggaggcacgctgaccaagaattgatctgtaacaaagttcctagattggatccagcttcaaaaatcatgtcaatcaagaaagctcgtgtgtcagttcgagcaagattttctccaatggttagtaaattatataaataaagtaaaattgacatatgcaactctatcatctccaatatatagtaacatcatgtgatttacccattaacaaattcagcctagttagctggctaatcgatgacttctaatttctaaggaaaggggatgtaatttactaatgtgaagtttgcacacgttaatttcttgtttcttgaaaatacatcatggaaaatttacgtgttaactttctttttgatgaatcctttattacagattgcagatggatgccaatggcgaaagtataggaaaaagagggcgaaaggaaatccttttccaagagcctattatcgttgcacaatgagtactggttgtccagtaaggaaacaagtatgcactcttgctaggaaatttttttctttcatttgcgttaaattgttctttctgctgagactggctaattaaagcaaggaggaaattctcttacggtattaggaaactagcaagacatttctggtgggggaaagacaaattaaaacttaatttgcaaaattttaatataatttagcacactttaccgagcttgagttgagtgcactaaattaacaaagaattgaattataatcaatacattagtgaacaaaagatttatttaataatactgtactttaattatcagtaatgcacacccaactcaagtatattaggtttatacaagaatttctattgtacttaccaatcgatccctctccttttttggggacatacgctacccaaaagtgcctggtaagggcatggaaaatgatatccagcttagagtgtgaatgttatagggatcaaaaagcctgtatcagctggtgctttctaagaaatcttgaggggtaatgaaactttgccagttagctaatggctacaaattaaagccattgggaaggaattgatacattttgtctctaacattaacatgaataaataatatatgcatataattcaacaccttttatacaatcactcaatcacaaaatacaaaatattatgtataataagtttgttagacttttataataaatatatcttaaatatcataccaaaaattatttttgattaattgatagtacaaaaactttataatatatatatatatatgttaatttgttaaactccatgagtactatacagagaaatcaaggtttaccaaatagtggatttatgtttgttcataggtacaaaggtgtgctgaagacagaagtgtgctgatcagtgatcacaacatatgaagggcagcataaccatccacagcccaggcaatggcatccacaacatctgcagctgcctcaatgcttctttctggatcaatgccaagctcagatggcctaatcaatccaagcatattagaaagtgcttcacttccatgctctcagaacatggcaactctttgacctcagccccatttcccaacatcacattggatctcactcataatgcaaccaattcctcacagctacaaagtgaattaccacagggccaacatggcctcttattcccacttttggctcataagtttatgtcagttccaaaaatatttggactggcactgtgtgatcaaactaagcttgctggcttgcatgagtctcagggaatggacacaacttcatcatttgctaacacattaaatgcagccactgctgctatcacagcagaccccaatttcactgcactcttgtggcagctgtaacatctgtttcacattcaaacactaatgagcattgtaacaataatacataagactcgttaattccttttgcaaattggtgtagttttgatcgttttcatattcaacataggtatagagatttttatttcgtcaatgtcatgcatacaaaaggatgttacattggacgaatcactatattataatctttcattatttgagattgatatcttaacaaggcattcatttttttaagttgtgttcaatagtaagtacaccattcgtttcaagtaataaagtgagtaagtagagtatcgtctacacagggattgaggcacaaattttatcgcaacttattatattcattttttaagttgtgttcaatagcatatatcgctaacaaaacattttggaagctttattaactttattgtacaaataaaaatgacatgtttttaattcttttaaaatagcaaaaacaaaaaaattagtttgctttttttcacgtacgcaggaaaagtgtttgaacaagtgaacaactacattatggttttttttttgtttttttataaaagaactgcattatggttaacaattcnnnnnnnnnnnnnnnnnnnnnnnnnnnnnnnnnnnnnnnnnnnnnnnnnnnnnnnnnnnnnnnnnnnnnnnnnnnnnnnnnnnnnnnnnnnnnnnnnnnnnnnnnnnnnnnnnnnnnnnngactaaatcaattaaaagtttgttgacatatttattataaaattccacaaatttgttatatatgaaaatttgtaattaaatgatgattattatcatcttttcctttctcccactctaatccttttttaaaaagaaaatctaaaaaaagaataaccgttgaattaattatgatacaaattatcgttacacatatcaccttttttaattaattgtgatatgaattacctttgtttttattaaaatttgaattaatgatgatataaattatcctttttaattataatcaaattaattatgatataaactaatatcatatttaatttaattactgttaaaaatgacatcattgactactattaaaaacggtaagttgtctcttaattaatttaatcttaattaaaaaataataatttgtattacaattaattgtattacttaagaaaagtaacttatatttataattaattaacaaaaatttgtaaagaaaaatatagaatataaacataattttgttgagtaaaagagtgtaaaagaattatacaatgaaaacatgattttgttgataatatttttttcattgcacttcctcttatataatggagacatgatctcattgtctaatttatctaccagaatcatgttttcattaaaaagggtaattttggaataatgtcatttttaaagcacgtggggtacaaatagtaaaattgggagtgagagtggcaatccctaacaatggtttacttttaaaccaggtcgtctcccttatagcctacacacattgttccttcttgcccgacggtagcaacgctgttttgtagccgttgctgccttcaaaattaacaaaactactcgctctccacaaattacctcacggtattctatttcttctctaaacttttcgttatttctttctagaaagtctgtgttggattcatcattcttcctctattttttttttcctatgttatcatcttcaatagttttttggtccggatttctctgctgtttattctgaagcgatgtttttaaagcacatacatttatagtcaagtgattcctcttgtttcttggcatagaaaaaagtgattcctcttgtttcttggcatagaaaaaagtgattcctcttgtttcttggcatagaaaaaagtgattccactcaaaacaagtttaattaattttttttttccaatatcttttcaagttacatgcatgcccttttgcttcctatattgagagttgaaggatttgaaactggagtatgcaattaatggttatttgtgtgcttctgtaataacatataagcactttgtcttgtactccaatagaacacaatgagtgctgcttctttgctatgctcctgctctatgcatgtgggtgtgtctcatcccaaggtggctgcaaaatcctctccatgctgtttgctcaatcagccatgggatcatttaaagtcaaaaacaccatttgggcattcaggagtctttgaaaaatctaaactttcacataaaggtgatgagattctgtggagggcgggggcccttcaagttgaaagtgcaccctccttctctgtggggcaaaaatttcaccttcatgatgtgatagaggctcagcaatttgacagagagactctcaatgccatatttgaagttgcaaggagcatggagagtatcgaaagcaagtcatctaggagccaaatgctaaagggttacctcatggctactttgttttatgagccatccactagaacaaggctttcatttgagtctgccatgaaaagattaggtggggatgttctcacaactgagaatgcaagggagttttcgtctgctgctaaaggagagacgcttgaaggtatgtcctttcaattaacaatgcaagttttgttagtacttagtgggttctttcattgttattctatctaaaattggtgtttcgtggaactttacttcttgcagatactataagaacggttgaaggttatactgatataattgtgatgaggcactttgaaagtggtgctgccaaaagagcagcaacaactgctagcattcctgtaatcaatgcaggggatggccctggacagcatcccacccaggtatgaggaatttgccacaataggtacagattataattctgatgcttcacatagaatgtcaagtagatattatcataggatgatttatttttcaaagtaatcttgagtctattgcccttagctactttttgactgcagagattgcactatttcattttcatttgtagtatctgccaccttgttgttaaaaccatgaattagcattgaactatgatagataagcttttgctgctgagcaattttgtggaagcataactatgtgtgtctggtaacgtgtcatggtcctcgaggacatggtttttgagatctgaatagaagctactggctgtgtagcttttgcatcatttgttgatttgacctgatttattccctgccaaacgtatttccaaaaacagggaaaatccacttaacaaatttgtttccatgacttactcccaatcaaattttaaaaacaaacccccttattctgctgatgctgtctcatggtatttgaaactgaaagggccacaacttctccttataatttcttaggagaagttgattgggtagaaggggtttacaatgacctatgaatataaaattaattcttttatgggacataccttcaagacttcgactcaagaaattgtatctttctctttcttggggaaaagaaatttattttcaattaaccaaaaatgtgccaaaaaccaattgaagtataaatctaaatggagttccatttttctagtgaggtacttgctatcaaggattgaaatggtagcttcctttgagtacacaccagtttcctagccaattgtaacaatatattatggacttttccatctgaaggtttcttcgattatactttattctttaggtacataccttcttatatattttactagtttatttacacttgacaagatgattccatgtttgattcttctttagtgtttttcttgtagaaaatacagatataggggaatttttgtgactttttatttattgtttgtgtattttgctatatttataatagtttgggtggtaattggatgatattatttttgtgtttcaaaactctttatttttcaaactgctcaggcactgctagatgtttataccattgaaagagagataggaaaactggacggaattagagttgggcttgtgggagaccttgctaatgggagaactgttcgctcacttgcatacttactagccaagtatcaggatgtgaaaatttattttgtctctccaaacgtggttaaaatgaaggtaactgttgcaaatactaattatggtttcatgagaaggataagatgttgggaattacaggacaaaatgagttatggaatttttttttttcataggatgacataaaagactatctgacatcaaagggagtggagtgggaagaaagtgctgatttgatggaagttgcttctaagtgcgatgtggtttatcaaactcgcattcagaaagaaagatttggagagaaaattgaactttatgaggaggcaagaggcaagtatattgtaaatcaagatgttctaaatgtgatgcaaaaacatgctgtggttatgcaccctcttccaagacttgacgaggtaagtacatattgccatgtcatgtgatatatgttatcccgatacgaatgcaagcgttaagattaaataaactaaattggtcccttaatttatgcagatcacagtggaagttgatagagatccaagagctgcttactttaggcaggcaaagaatggtctatatattaggatggctctcttaaagatattgcttcttggttggtaaggatacattcacttttcaaagtgaatgggatgatctaatgtcaaaaaaattcagttgtttctttgtctcctttccttgccttttagcatgtttggtatcatgttgacgtaatttcacagttagatcagagctggtaggtattgcttctgcgtcttttagtaaatggacgtggtttcccatgtatctactgtgttgtttccaaacgtagttaggcgtcacaaatacagtgagagggagaaataaaattttctttttgcatgagtaaaatttccttgaaatgcaagttttttccacctcagtgcaagctacagtcactaagttataatataaaccatctaaattattataacgtggaagtttataacatccataaccttggtaatttgttatccataacaagaaacaggaccatgcttctgtgtcccacggaataatctgcatatcatcaaattatggattcaactttgcttacaccatctaattctactgatataaaataagtaaaagttgaaactctagaaggcaaatgcacaatcatttctctgcaagtcttaacttccttcagactaagtgtttgaactctgcttccatttctgcaaactaacaaagtagtcttcttcgtttaaatgatccttttatgagaacgaccaaatcctgcagaattgtttgttttacgtatgattcttatgctgctttttgacttgtttgccttaagcatatgttaatatcaaagtagggattgggatacgtgatgcaaggtattttgttctatatgactatgtgtttgtgcgtggtcaagctttatggaaatgtattttgttctatatgactatgtgtttgtgcgtggtcaagctttatggaaatccatgttaaggcgcgagttgttattatcgtaataatttcatgaaattacaaatcgaatatctttaaaattagtctttgaatgttaataaaataggaactaaattgatggatatttaatactttgagagcagtgctataccgtacgaaaaacaaaaacatgaaattcacgaatcagttaatttaactccgatttaggtattataatttgtagccacgtatatttgtgtggattcgtacaacgaaattttcgtaacatttagtattttccatgtgatattattgtctcagcaaacatcatttgatgaaaggaatggaaagtaactattattggcaactgtagcaacaacgtgaataacctgtggttttttaaactctacccaatgcgaagaaaaaagtaaaaatgaataggctacaatttttctataacaattcaaaaacaagaataaaatcaattaagactaaaannnnnnnnnnnnnnnnnnnnnnnnnnnnnnnnnnnnnnnnnnnnnnnnnnnnnnnnnnnnnnnnnnnnnnnnnnnnnnnnnnnnaaaaaaaaaaaagagtcacgtgaatgttataaatagacatggaaaaatgaaagcagcgtcactaataaaatatagggagaaataatttcaagccagcagtataacttaatgaaagtaatatttaacatagctaaacgtgtcagctaatatgtagggaacctagggtccacattgtgggcccaagactctaagccaccaacaatatccttggcagaagtgaaacccattttgtgaagatactgaacagccctttgagaatcatttccccttctgcatactacatacaattgtgcacttgatccagaaactgcaccactttcctcttcctctttcttcaaagctgatgatacttcaggcagcctagcctctaatgttgaaagtggaatgttcatagactttggtagagatacaatcttgaaatggtgagttggtctaacatcaaccagcacatgtggttccttcttaataattacttcactgtactccttgctgctgattcttgattcactgggaagtagatttaacttcaaaggaggctgcatataaatggaatggaatgcattaatgacatggaaaatctcaaaataatatatactgggagagaattttgtagtcttttgggaggaattttatctccagcaatctcatccaatacaaagtgcaaatgaaaaatatacccaactaaaccttaaaacaatttcatctaaatacaaaggaggtgaaaggcaagaaaaaaagaaatcataccacacgcaagggagtctgagtgaacttctcataatcaaattctcggaattgctgttgggtaaatgttgcattttctccacaagcttcacactgcatagaccttcctctaattttgacctgtgcaataaaaaaagtataatcagtaactaataaataagatcttgctatggtatcatgctcaaaaaaccataatataatttttttactttgagacatcataattacaaatatgatttggaactgtatatattacaagtctaagtttaatttgggatagccagtttgaaaagcaatttgttattagaattataaagaaaatgattggtctgcatgacagttattattagtgacagaaaaattggtgtgaatatgagaatcactcaatagtaatgtcaatcaattcctctaaggagtatccttaagtaggaaaacctttatcctaatagttccaataccactaggatacaaaaccctaactttgcatccaggtaatttatcgaaataaaatcctaatttataagaaatcctaaacattcaaacaattatttgatgccccacttgtaaaatcctaatagacattggagttcttaacatacaatacgaatccgtccagacaatgcatccaagagaagcatccttcctgagagtggctcaccaacagaagctgcaattttaatagcctcaagagcttggagacaaccaattataccaggaactgaaaatgatcagagcaaatgtcagaaaagcagaaaaatagcaatagcagaacaaaaaatacaaaggtactagtgagaagtaatgcaagttgaacaataaatattcataataactgacacggatgataataatcacagtttagctaaacgaattatataacaacttacaacattccaaagtccaaacaaattgaatttttagccaataagtcttactaaagagtacactctccggtaaacaataagaatttcttattgtttgcaaaaacctccttttcagtaaaacttgattgcttaaaacatagatacttccccatttgtagagacagttttggcaaaaggaatcaaacaatcagactcattttttgttgtcactaatagttatagtacatattactaaaagtccatgactgaacttcacaatgaaaacaggagagcagaagaatttgtcttatggttcacattgttcatgctaatgtaaatgtctcacagactagcaatgagaagtaaaagtgatacagttcacaaagacagtagtaattttacctactcctagaactccaccctcagcacaactttggcatgctgttctaggtggtggagttggaaagaggcatcgatagcaaggaccaccattgtaattgtagacagtaagctgcagtaaaagtttccatatttaatcctcaaattatgtgatataatcaagcacacaggagtacttgtcgcactatgaagcattattcaacttaaatgctagtaaaataaaaattagacatatacctgcccttccaatcccagtgcagcacctgatacaagaggctgcatcataggaaaacagttaatataaaaaattgcaaaagtaacttaagtttcccataaatcatactgtgtacataagtataaaaaaagaaccaaaaacgaaattgtttaacggaatgaaatataagaaattcatataattgtaacttttcaaatttatgaaaaattgatgtctactgggagcaattgcacaaagattttggagataacaactcatatggcacatacatactgaaatattttataggtatcatgcacataggagcttgcataacttcctttttgttgaattaatgtagatatcttttgcattgatgaaccaaaacattaaaaataatgctgacttagaaagtgtatccatggaggaaccaaaaaattaaagcaacaagtgaaaaggcccatgtgacatcaattcaaatggtcacaatctcttcatacatcaaaacattaacatttacctttcctagaaccacacagcaatcactgatcaagtatcgggtaggagcattatctgttgcatctactattatatcatatctaccaaattcacataattacaaaaaaaaaaaaaatagtcagtggtaatataaaaaatgaaatgtaaaatgtaagtatagaagaaagaggcctcaagcaaaaagaaaaatcaatcttattttagaaattatacttgctgagaatttccaaagcgttggaagtccgcaaagcttcttcatgttccacaacttgaatagtggagttgatcctaatattcaaaatatcttagttccaagaacaatgatgatacaaatattacaataacaaacatttgaaaaagaaaatttctcatgggattttatttgcagtttgtcaacaaaaattgatgtgatgaatggttggtgaaaaagtaacctacgagcgacaagcagcagcagcagatttcactttcggcttaccaacatatgcttccgtgtggataacctgaaataaagcaccaacttgtccaaattaataaaaatagtgaagttaactaaaaaaaatcagtaaacgaacacaaacacagaagcaagacacatactaacaccttgtaatcgcaaaagtgcaaaagcccaaaggctgatgccagacacaaacacaacaattcacaatgtacgtgttgcaccggctatgccaaaaagagggtgggaaggtaaaacagataatacaatacctgcctatgcatattattcagctcaactacgtcatggtcaataacacccaagcgccctgagtatagtttttaaaatgtaagtttcaagaagcatatagacagaggttatgtttgggacgagaagaaaataagaaagtaaaataaattaagtttcccccataagttaaaatcaacttggcacttatcttctccaaaagcttaagtgtataagatgattttaacttgtgcaagaaggtgactttatttttctttcttatttccttcacttataagtgtttatgaaaaatttatccaaacaaagcttagaagtgtcatatattaccaacaccagaagctgcaacgtataacaatgcaggagcacccaaacctccagctcccacaactaagattgacgacttcaatagatttgcctgccctgcactccacaaacacaagaaggtgggaaaattgaagacaaaaaannnnnnnnnnnnnnnnnnnnnnnnnnnnnnnnnnnnnnnnnnnnnnnnnnnnnnnnnnnnnnnnnnnnnnnnnnnnnnnnnnnnnnnnnnnnnnnnnnnnnnnnnnnnnnnnnnnnnnnnnnnnnnnnnnnnnnnnnnnnnnaaaaaaaaaaaaaaaaaaaaaaaaaaaaaaaaaaaaaaaacaagataaacatgcagataagggctatttgtctataaaggagttgcaacatggaactaactacagttaatactcaaacacacaggtgcaacgaatatgaatcttccttcattcttaatttaaacttaattaggtttatgtagcatgaatgataattaaatgaatatagaaaatgttgaagagaagaagaccttgaacaccaaaggaagggagcacaaggtggcgactgtatctgtgaatcatgtcctgggtcaatccattggtggggtacgatgaagaagaagaagcatagggtggtgcggcgtcgttttggagattaatctctttgagttgagcttcaagcgcagagattttgtgctcaattttggtcttttcgtccttcagcaaatccagttcccgaagaatctccgacgccgacatggcaacgcaatgaacaaactatctatcctatgttgagtgttgacgatgttcctgcgcaaaagcagggtcctactttctagtccaataatactgtgcttcgaattgatatgggaaaaaactagtattaattactaatgtcgtattgatatggttattaaaaagtacagtagtttttacttaattaacatttcattcaaaaaataaacttaattattatgttagggtgttataaaatatcatttttgtatgctctaaaaggattaataaaggcgtgaattgattggatttttgttttgatattaacatttttttatatttttataattagtctttgaatataaaaaattccattatatatatatatacacagatattatttttatattcccatagtttttacattgaacataaattattataattagttaaattataattaatattttttgtaaatatttgtaaaaaatttgtaattagatatcatttatggaagttacaaaaataattcttaaattttttatgttcctataaatatttaattatttaaattaactaattttaattatgtatatatatatatatatatatatatatatatatattagttaaaaaagtataactccttaattagttttaaccttttattatcaaagtcaagatgcccaactcaagtttgttagagggtgtgggttcaaatcccacttccgacatttatttttaaatccaaaaaaaatcaacttataaaaaattattttattttattattttattattattcaagacttataaaatgtcgatatacattatattaataataattacacaataataattttatgaaacaattacaaagttagttttagtaataattttgtaaacacaaactatgataaataaatattaattatagattaatactttaaatttttcactaatatattattgggttgaatgatattgaactcaaataagtaagtaaagttgagtcaccatcttgtgaatgaaaaaatgtagatgaaagaaaatatcataataaaagtagttaaacatatttttgaaaattagtcatcgataaaatcaatgaatattttagatcaataacatataaaaaaatgtgttcatttattttattttggtttctagtatgatatttttatttaaaaaaatgaaattcttaaatataataaatgaatgtattataactagtgaatgaatgcacaaaatcaattactcattaatgacactgnnnnnnnnnnnnnnnnnnnnnnnnnnnnnnnnnnnnnnnnnnnnnnnnnnnnnnnnnnnnnnnnnnnnnnnnnnnnnnnnnnnnnnnnnnnnnnnnnnnnnnnnnnnnnnnnnnnnnnnnnnnnnnnnnnnnnnnnnnnnnnnnnnnnnnnnnnnnnnnnnnnnnnnnnnnnnnnnnnnnnnnnnnnnnnnnnnnnnnnnnnnnnnnnnnnnnnnnnnnnnnnnnnnnnnnnnnnnnnnnnnnnnnnnnnnnnnnnnnnnnnnnnnnnnnnnnnnnnnnnnnnnnnnnnnnnnnnnnnnnnnnnnnnnnnnnnnnnnnnnnnnnnnnnnnnnnnnnnnnnnnnnnnnnnnnnnnnnnnnnnnnnnnnnnnnnnnnnnnnnnnnnnnnnnnnnnnnnnnnnnnnnnnnnnnnnnnnnnnnnnnnnnnnnnnnnnnnnnnnnnnnnnnnnnnnnnnnnnnnnnnnnnnnnnnnnnnnnnnnnnnnnnnnnnnnnnnnnnnnnnnnnnnnnnnnnnnnnnnnnnnnnnnnnnnnnnnnnnnnnnnnnnnnnnnnnnnnnnnnnnnnnnnnnnnnnnnnnnnnnnnnnnnnnnnnnnnnnnnnnnnnnnnnnnnnnnnnnnnnnnnnnnnnnnnnnnnnnnnnnnnnnnnnnnnnnnnnnnnnnnnnnnnnnnnnnnnnnnnnnnnnnnnnnnnnnnnnnnnnnnnnnnnnnnnnnnnnnnnnnnnnnnnnnnnnnnnnnnnnnnnnnnnnnnnnnnnnnnnnnnnnnnnnnnnnnnnnnnnnnnnnnnnnnnnnnnnnnnnnnnnnnnnnnnnnnnnnnnnnnnnnnnnnnnnnnnnnnnnnnnnnnnnnnnnnnnnnnnnnnnnnnnnnnnnnnnnnnnnnnnnnnnnnnnnnnnnnnnnnnnnnnnnnnnnnnnnnnnnnnnnnnnnnnnnnnnnnnnnnnnnnnnnnnnnnnnnnnnnnnnnnnnnnnnnnnnnnnnnnnnnnnnnnnnnnnnnnnnnnnnnnnnnnnnnnnnnnnnnnnnnnnnnnnnnnnnnnnnnnnnnnnnnnnnnnnnnnnnnnnnnnnnnnnnnnnnnnnnnnnnnnnnnnnnnnnnnnnnnnnnnnnnnnnnnnnnnnnnnnnnnnnnnnnnnnnnnnnnnnnnnnnnnnnnnnnnnnnnnnnnnnnnnnnnnnnnnnnnnnnnnnnnnnnnnnnnnnnnnnnnnnnnnnnnnnnnnnnnnnnnnnnnnnnnnnnnnnnnnnnnnnnnngatcatttcttgaatggatgctttgttgacaaattgaaaatgattttttaacctcaattcaatatggaaaaacttaccaaaaaaaaaaatttcattttgataaataaaattcatggtatccttatttctaataatacttataaaaaataataataataatccataattagagagaaaaataaatattttttatagaaaatctttagtaactacattttttaatttaataagtaaatttttaattttatttattgaaaaatgttagcaaaacattccttttaaatctaacacatgcactttatcattggttagaatatattaaaaattacaaaatcaagagaaaaagagtcattaaataacaaatgaaacctaaaaaaattataattttcaataaatttcagttaactataaagaatatgttcaaaagagtatattcaaaaatatgttgttggtatttcttttatttcaatatacttaagtaataaaggttgaaattaaatattaatgttaatcattaaattgaaattataatttaattaattttgtgagtttagtcattgatggagatttttcttttggtattagtcattaataagtgggatagactagacagattcattggattagcattacgtcattaacaaagggcaatacatggatatctggattgagtttgaggccaggagtaatcttgtccttaatgtttttggtttttatttaaacagacatgagagcccaaattatactaactagtaactagtctctatcaaacaaccaaacatttcctgaagatagagagagggaagaaccatggtcggtggtcagttccacactcttttccatgccacttcaagatcctccctggtaaagcctagcagtagtaggccattcttcaacagcaccattaaggtatcccttttattttcatttcctttttaaatctctgttctgttcttttctttttctttcactcgttttccaagttattctacttcaatttgcttctctgctctagagttactaatttacattatctacttgctgtggaaactttttttattttttgtatgaatgcacccactagaaaattaaattacactaacaaaacgtggaattttaatcatttttagtttcattttgccttgggttggaaacaagttttaattaactttttgatgtgtttgagaaggtagaattcatgtatttaatggaaagttttcattttttttgcataatccagttcttgaaggtggaaatctagacttgagacatggattaaaacctagacaggctatgcttaattagattaaagttggaaaagtatttttgtgaattccaatttatatttgtgaatttcaatatataaaatgaaaaaggtagaatttgttaatttaagtgtaaaagcatatttgaactctctaataaaatccacacatgcactcaaaggggtttgctaaaaattaaaacctaatgattctattatgtgttgacaacatgttaaacagtgaccagaaagtaatgtattatttttttgttattgaatgtatcagaattatgggcaagcgagcaatggaaaccgtagtaaccgtttgatggaagagagggcaccttccacagctgaagagttccaaagagttgcagaggaaaaggccaaggaaaccaaggaaggggtggctaatcagaatgttgacaagtcatataatggtgcacaagaggctactaaggttcaatctgtcaagaacagctacaaatagttgtttgccaaaggagggttgattagaacttagaaaccactctctgaagtctgaatgaactatgagatttatattgtatatctctatataatatatagtatgcacctagattaataagattattgtgttattttcctagagctcccttgtaacttgtaagcgtttctgcagcagcagaaaaaaccaaacaatttaaggcttcggcatattattaattattaatctttcttgcctcatgtacatgtaactactatttgaaattctgtgaagctaagaaatctaattcagttagtctgagtaagatgttgaaggtattatctcttcctcacattattttcaatttccatgcatcaaaaaatctatttgaaatcctgggcttgggggattaaactccgcctttattttagcagattggcttgttgattgagtatgttgaaattttgaaatccaatgcagttaattggttggttagttgtttctactcaaaaaatttaccatctctgtttttattttatttgacacttcaaaaaatatttttctttatgtcccataaaaatttaaagataatattaagggagtgtacacggtgtccccaataatttgaggtgttttgatactattaatttttttaatcaattaaattacatgtcaccttctcattaattatatttatttttgttttttaaattagtccttgattattattttttaaaattgtaaaactttacctttttaaaattaagaaatatgattaaagataactttagaagtctgaattttaaaatatttttaggttcttttaatactttttataataaataaaaaatttgagatttaggatttaagttttaggactagggtttaaaaaattcttattgttatgttttaagcatagattttatgaaaagtgttaaaagtaactaaaaaaaattagtgtttagacttctaaacttatttttaattatattatctaattttaaaaagttactatttttaattataaaaaataataatcaagactaatttgaaaaaaaaaattaatgagaagataacatgtaatttaattgattaaaaattaacaatattaacccctaaattattggggacaccatacaaattctctaatattaattacaaatttttgaagtataccttattaaaagagagacaaaaataattgtatatgaaatgtaaaagtgaaaaaaagagactcttcctaagactgaggcgaagataagcagggcggaagctcgaccatccatcgacttaattgacagataattttagtatatatgataagattatttattttaaatttgtgtacgggttctgataaatttattctctattttgatgtatatgagtgaagggaaacaaaaaaataagaagaagaaaaatgtgataaaaaaggatggagaagaaaaagtgagtgcacaaatataattattatttgtgtattagaaccttaaataataggggaaaacaaggagtattaatttttaaataggtatgttaaaaaagaagaaaacaattaacaagtatcttcaatgtattaattaaaatattaatatttcatattatatatttttaattagttttaaaaagtattaaataaatttgcaccttcaaagtagtaaacgttttttttttcttcctattttaagacaccaggaacaattgcaaaaaaagataggatgttcagtagagtcttgggagtttattctttacagcatcattgacttgttatgtctaatgtgttgtgtaatcacagcatagcagaatcagcaattccttgtctaatgtggttagcttttcatttggtgtcaaaaagaagtgaaatttgtggtcatttaaacactttttttttcttttacggtgctattggtgaggtgagatgtgtccttatagtccattgagactatgtttttgtcccaactccttttcgtggttgggagttatcgtccactttgaaatttattggaatgagagacaactcgacctactttagtacttgtctggcaatgtgcattattttggcacttagatgtatatctaggtattcgcattttttttaataaaaaaacagtgtatcaaatttaaattcgtgttaatactaattttaatattgatacatttgtctattgtctattaataagataatacctggagtgtagatatgttaattctatcttatactgaaataagtatatacttatcatatttaatttgtgtactttaattgataataaatattaaatttataaaagataatctaaattcgatctccacataatacaataatatcaaatatataaaaaattataagattaccgtttaatctaatatgatcttatcctaataaatctattaattctgatattattttatcagctacatttttatcaatttaaaccttatacagctatcttatttgcattttttatttattttccccttattttactctcacatccaaataaattgttaaaagctaaatattagtaattaataattgttagatgagatctttgattacaactatagatgagatcgtggatattgtggataataacaggaaagattgtaagattaaatagttaaagatgtcggcagtgattattaggaagatcgtgaggtcaagctattagagatctcgacctgattatcgaaaagaatcctaaactgacttagaggttcagtataaataagggatgtttctagagaaaaaagtatgcacatatcaattttctcttctcttttcattaacactgtgcacacatctcaccagtatcgcttcgtgcatagtaattatttctttaaagatgtttctcttccataaacatcttgagaaaaagcttaatcctatatagaatttattagcatcctaactggacatttctgttcgtaagaaaatagaacaataatgataataaaatctttcaagtattggatgaacagatattctgagctttggcgacctcctgccatgacagttccccttgattctgcttatggcaccacgaaaattaaagtagtggaccaaaagtcagtcctgtctactcaaattcaaagagataatgaaaaaatatccattttagaatggaacaaaacacctgcacagagatgcatacatgccaagtgggttaaaacaattactgtatgttttatttttagttgaaattactgtagcgtattgcaatataatccaatgaataaaagtaaaagtaaaaacaagagtcttaatttctttgcaaaaatatttttacctcaaacatatttttccgcctgatattgaaagatgcacttaaactgtgagagaaagaaagaagggtttacacttttactgaagagtgacatacttagctttattcctatcctttgtagaatgtgagacaaaagagaccacgagtttgttaggtgtggaaatataatgaaataaaattataacttgactccttgtcttgtgtacaagacaatatatggggccacaagctcacaagagagtttggtaggtactaaagaaacaaaatggaaaattttattttgtgattaattatacacaataactttaaggtgcatgtcttttgacaaaggatgaagtaactaacaagaagaaagaccatcgagaaacaccaaatctacctgcaatgagagttaattaggagaaaagaaaatcctatgtaatttagaaaaatattagagcttatgcaatttaacaaatataagtggtagcattacatgttttggcatgaataacatgccataacatgagtaaacaagaatgatgcggttgattctactcctcatctgtaaagagtaagaagtattcattgaacatttccgtgtactatagtcatgtcagcaaagtggtgaagaatctgtaccctaaaatccccaacacatagccacaaacttaactatctgctcaacataatggctgtgtattaatgaaaattccaatatagattgggttattattcagtgacatagaactaaagaatgagcattttgtttcgcggatcaggggccctgtcgtatgatggtaaaatcggtagaatcaatgcattgttaagatcctaaaataaggagattcgagtactatatattgaagattcaggtcacagcaggttttgctttgggccatggcataatgcccaaaacaaatgaactcgatgccatggtgtgtgcatctcgtgtactcactaggcttgggccaagacatgtgtttggttgagttttttgcctttattttaacttctcccccaaacaaaaaacttaaatagaaatttccttaaaaaaatatattggtttctaaggggcaaaaaaatttaaatattatagttttattaataaattacgtatatgctgcagtttcaaacttatttacgtgggtatagcaaccaatggcgcctcagcaggacgcggccagtggcgcccccagcaggcgtgactggggcttagtcgcgccccagggaggcgcgactctgcagatgctgacacgtgtcatcttggacacgtgtcaaattgcggcgcgatgcggaataacttcgaaaggtcataacttttgactgaaacgtccgattgacgcgaaaccggtggccacgcgctcgaaattgagaggagaaggcctgggtaagtacttgttttaggaacgtccgatctgactgtaacagttttaattttgttttaggaagttattagacagttattttatattaatttcataaatctctgttttagcatgtcctatgttaatgattgtttttaagacaatggaacatgcgaactttatgtggtttagtaataatgattttattaatttttgaatgatttattcaaaggcataaatgaaagcattttgaataatagttaaacctaatacggttataacaaaaaacttgtttacgaaaggcttcaaaatttaaaaaaaaaaaaaaaatcaacacctttctaagacggttctgtaagaacccatcttagaaacaccccaatcaaagacgattttggtgcgaatctgtctttaaacatcctctttctaagatggttatatacaggatcgtctttgtatgtattaaaaaaaataaaaaataaaaaccaatcaatgtcttcactctgcagacatttttttaacaacgttcctaaaacaaaattaaaactgttgaagtcagatcggacgttcctaaaacaagtttgaaactacagcatatacgtaatttattaataagtttgaaactacagcatatacgtaatttattaataactatcttaattgggataagtttgaaactacaacatatacgtaatttattaataaaactataatatttaaatttttttgcctttctaaggttttcttcgagaaaaataaataaatatgcacgacttgcaaaaattagtagatggaactaaatggccaaagctcaccatcttaaaattttcaattaccaagtattccattgattatttttttnnnnnnnnnnnnnnnnnnnnnnnnnnnnnnnnnnnnnnnnnnnnnnnnnnnnnnnnnnnnnnnnnnnnnnnnnnnnnnnnnnnnnnnnnnnnnnnnnnnnnnnnnnnnnnnnnnnnnnnnnnnnnnnnnnnnnnnnnnnnnnnnnnnnnnnnnnnnnnnnnnnnnnnnnnnnnnnnnnnnnnnnnnnnnnnnnnnnnnnnnnnnnnnnnnnnttcccccccccccccccccgcctcttttatatttcaagcttttagttttctggtagtgttaatttgttgcatttatatcgagaagtgctacctatgccttttttattattattaataggtaaaatcctatattgatttcatcttgactccaaaaaatatatattattaaataacaagtttcaaagagtatagtccaagcaatttttttcaacatttgataaatttcctcctgctggaatttttctgatttatatttcacatatgctacttttcttttgtctttaacatatgctacttgagttaacgtggttttgatgaaatttcctgaatctttaaaagtccctgtcttaaatcgtgagtgccccgagtgatcacgaattgccattatggtttcctgattttcttgcagaattaattacttctgttcattaaattatcccaattatagatagtgtcgttgctgcagggtggcattttcgctactgcactactagtattccttttacgacattcaaacattcttgatgtaaatctagtattaattgtgcttcacggaaaatgacactttcacacaaacacacacttccttaaaaatgtcctaaagtgaaaagtacccaccgtgttgacacttccacgcgctaacagtgcgcgtcgaccaatcgggcatgagaaaaagaagtagtactagtaaatgggaacatggtctcttgtgctgggtttccacattttgaaccttgtgactgtgaccaataaatatacttgaatttgaattaacgtcgtggcactaattcctgcttgattttcgttttgggtggcttttcctgttttccatgtgcctcatgcgacaccatttccccgcaaattcggttacaaggaaaagtgcttttggtcctttagctcatgccgttcgttgcaaccgtaattaaaggggaagaatggaaaatcagaagacaagcaaacagagttatgaagaaagaaatgaaacacccaagaatcccgtgaattttttaaaacatatagtattgtcaatttagtgttatattcgatctcccttcctacatgctccaagtattacaaatgacacttgcctttttgtgtcggtagctgcaactattactattaggttgccaatctatcaaacttaaaacttttatctcaattgtcctttttgacgttgaaactcactaaattttcacgttttttaattatttagtttgtttgttttctttgtgataaattaaaattcttaggtttgaataaagtcgtaaaaatatgagaaaaaataaaagcacatggtataaattgtccaagtctttaactactaacccaaaagaacagaaccttctaatttaactacgaatgcaactctttccaattgctaggctaactataagtggtgcaaattgctattccacctaatgtctctagacgcgtttctgcgtcaacattgattgtatagtttgtatcttactatatactaatatactcaaattacaattacaatggcagtgcaaaaattaagtaagcactgttaagaaatattctttgcccggaattatggaccaaaaaaaatctctataaccccaattagctagaagctaccaaaggggtttcattgtaataaacatcagcatgtgcatgtgattgatgaaatctagcaaaaacccctactagtgctgcagtattgtaggtacaagcctctgtttgaacgtaatttcgtctatcatctttaaattggtctttgatatcaggcccaccaacgagtgccccaatgagtacatttggattgggttcaacacgtccataccaattatcataaccctgagtgcacccaataaaacccttattttccccatatgattcaatggatgcgcccctatggtgcaccctccgggggaattttggaccgtagcctaccaagtaactcatagccattggattagagcccaaaatataatcaacctgtgattttgcaaaggccaacatctcatggggacccacctcccctttttggcaatgcagcttctgatcagtggctaggagatgatcagaataaactgtgagaagaaacgacgccgttgctacgtattgcatgttgttccattggcggatgtatagtaaccctcctggggtgcgctccacgttattaacgctgttgaggttcagacacgcgcataggtagtgctcggcttttgaacgacactgtttgagtatgacttcgtgtttcttgtgcttcttttcttccataaggaactgttaaaaggaaaaatgtcggtaagcaatttacggtattctttcttgtactcttttaaacatttttttataatttattagaatttatttttaatgataaatcttgaactcaatatctgatttttactagattgtccaataaaaaagctgaaaagatctttaatataaataatgaattcttatatgaaaagatttcttatttcttttttttctaagatttcaaaataagatgtaacactaaaaaaaaattatacgtgattttatgaaaattatcaaaaatataatataagattttaatttgaaatttatcactaaatatgttttaaaaatttattctcgatgtaaattgaatcgaactatgctaatgccaattttttaaatattcttttttgaatatttattgattaaaatttattgaaataattaattttaatagtatttatttttaattaatatttttctctcctaatttatattagatgagaaataaaacttataaaaattgatagtttttaaataaattttaactaattataaaacaaatatataaaaaagaaagtgtgagaaagagagtgtcactcctctctatatgtataaagaaatccatgatgatccataatatgtaactaaggtccaataatactggcagtatagtgctttttagtttttttttttttttctgttcaaagtgagtatagtacttctaatgcaccttttttgacattttaacactttgaaaggtagaagaataatcaacgagatattacattttacaataaaggagaataaaaaaaggagaagggaagtgactctttgaattgggaagtgtgagggaattaccatggaagcaatggcttgaacaccagcgtacttaacgtcccagctgaattcagtcatggcccaagtggtcccaccaaagtcataagccttctccaaaaaataggttaaatattcctccttttgggtggccctatatagccaaactgctgcccacagcaactcatccatgtagccactaaccgaagcataataccctttagccactccaacactctcatcatacttgcccttgtacttgtcaccaaactcaaacaactacaaaacacaacaaccaaatcccttttataatctctctcaccaccaattgaaattaatcctaattaaattaatccataactacgaaacattgtcaataaaactaactcatacctgttgtgcatgatgcaaaagtagttgagagtaatgtgggtttgttctcctaaacaaaatggatgccgctgccaatgctgccgccgtctcgccggcaacatccgagccagggttgttggcgtcaaccttataagctcgccgtgatgtcgtcatgtcctccggccgctgccaacagtagtgatcagtgtcgccgtcacccgcctgaacattttacctcataagaccaaatatacacatataaccacttttataaaggaatttaacatcttcatcatttcattaccgtagcacacttcttttttacttttttattgagtgaaatttctgtatctttcgctaaatatgttgttgtcatttttgcaagtctgaatcctaaactagtgaaatctataacgtacagtattaaaaatatattatttgcggacaatgtttgataaacatgttatcttacacctagagatagatagagttgaaaaaaataaaaaattataagtatgaaagaatttataatttgattgatataaagaaagaattaagaaatgttggataaaatatttaaaataaaaaatatatgtatatcattactcattatttgcatttatatagtaacacaatttctaattaatatattaaaaataattgttactatatgatttaagatattataatctcctactaatctttatgttttttaattggacgttggatgtcgactaatctttatgtaataagtataaatagttacatttcttaatttattaaaaaaattcataacatatcccatgatcaattgaaattagacgaccggattttacataataattttccttttagattctctaatttaacaaatctcatttataaaattccatgttcatgccaagctgcgagtgataacacgcgccagtcacggcgagattgcaggaaattccggacgaatccgttgacagctccgacatttaaatctattcctccggttagcttggaagaagtaatcattcatcccattttcaacggcggcgcgtgggataatcaattttcaaaaaaataaaattttaaaaaaaatattcactggaattgaaattaatacctgaacccaaagaacatttggttgtgtgtgtgccttgatgaaataatcggttccccacttgatagcctccagagcgtgagcatactcgccggcagcagcgatttgttcgccgtattctatagcaccccatgagaggagtgttatggtgaaagccattggcaacccaaatttcacattgtcccctgcatcatagtaccctcccaccaagtccacctaagtgaccaaaaaaacaataaccataatattagaatgaatgtaaagctagcacaaaaggaaaacaacattgtttaaggttagtatgttaatatgaagtaatgtatgtaccccttgttctaggccatcagtgagggcagaatggtgacgccaagtgaccctttgattgtagggtaagcgacctgaacgctgtgactcgaaatagaggaggctctgggacagggcttggccatagttgaaggactcacaaaagggaataatgaagattgtgatgagagagagtaaagcaatgtatagtgtcgaacaccgtatattgttcttttgaacgttgcctttcttcatttctccctctctctctctcccatatgctatatctttgtttctctttatatatgctgtgtctagtgttgtggggttacgatttacggtgtcgttttcgtagggtcttggctagtgcatttggtctctcgtttgttttgtttgtaaacaaattcaaacagcttaatagagtagaatgtaaagaaaatatattttttaatcaagctgggcgcgtgacaaacatgctaggggtgaattttctgtgtaattgaacggctttattatacatttcaatttggaacggtaaggaaacttattattcttagccttgctaatgtatagaatggagcccgagatgtttgaaaaggtatttttcaggaattcaatccattcacacttggatgctagcataacggtatgtgccatgtgtattgtcttttaatgtctttgtgtatgtaaaaatctctggatgctagcataccggtatgtgccttgtgtcttgttttttaatgcctttgtgtatgtgagcaaaaatatggtaggtaactttattcatgcgaatgcctcacattacaataaagaaagaactgaactacctgtgtatgtaagcaaattcatggtaggtaactttattcatgtgaatgtctcattacaaaaacaataccaaatttcacttttccaaaccctcggtccggttgattaattctttttccctttggtaaaactttctatttatgtttggcttaattagacttttcctatcttaggtattataatggtgcattttgatcttttaaggtttcaatataaatcgcattctctaatattataattgtgcaattttattattgttgtgatgtggatatgattcagggcaatggcacaataattcatgatggttcctgatgagtgactttggtagtgttactcatagagattctcacgatcaaatcaaaatgtgtatgagagtaatgaatgagtgaagttattcatgcctaagaaaaactcacctatataggcatattcagcgagaaagacagttgggtttgttggattccacgtgtaagatcacgtgaccagatgtaatagggtatcctattagttaagtttggatattactcttatttaggtaatttcgagttaagcgcaagtgatagttttaactactaagtctgatgttgtttagggtggttacttttaatctagggtaaatagaaaaagtctcttttaatcgatcttcaattaaatatttaacaaattttgttaatatgttgccttacacaaatggttacgtattttcctaaattatgtgggaaaaaaatgtaaacgtgatgannnnnnnnnnnnnnnnnnnnnnnnnnnnnnnnnnnnnnnnnnnnnnnnnnnnnnnnnnnnnnnnnnnnnnnnnnnnnnnnnnnnnnnnnnnnnnnnnnnnnnnnnnnnnnnnnnnnnnnnnnnnnnnnnnnnnnnnnnnnnnnnnnnnnnnnnnnnnnnnnnnnnnnnnnnnnnnnnnnnnnnnnnnnnnnnnnnnnnnnnnnnnnnnnnnnnnnnnnnnnnnnnnnnnnnnnnnnnnnnnnnnnnnnnnnnnnnnnnnnnnnnnnnnnnnnnnnnnnnnnnnnnnnnnnnnnnnnnnnnnnnnnnnnnnnnnnnnnnnnnnnnnnnnnnnnnnnnnnnnnnnnnnnnnnnnnnnnnnnnnnnnnnnnnnnnnnnnnnnnnnnnnnnnnnnnnnnnnnnnnnnnnnnnnnnnnnnnnnnnnnnnnnnnnnnnnnnnnnnnnnnnnnnnnnnnnnnnnnnnnnnnnnnnnnnnnnnnnnnnnnnnnnnnnnnnnnnnnnnnnnnnnnnnnnnnnnnnnnnnnnnnnnnnnnnnnnnnnnnnnnnnnnnnnnnnnnnnnnnnnnnnnnnnnnnnnnnnnnnnnnnnnnnnnnnnnnnnnnnnnnnnnnnnnnnnnnnnnnnnnnnnnnnnnnnnnnnnnnnnnnnnnnnnnnnnnnnnnnnnnnnnnnnnnnnnnnnnnnnnnnnnnnnnnnnnnnnnnnnnnnnnnnnnnnnnnnnnnnnnnnnnnnnnnnnnnnnnnnnnnnnnnnnnnnnnnnnnnnnnnnnnnnnnnnnnnnnnnnnnnnnnnnnnnnnnnnnnnnnnnnnnnnnnnnnnnnnnnnnnnnnnnnnnnnnnnnnnnnnnnnnnnnnnnnnnnnnnnnnnnnnnnnnnnnnnnnnnnnnnnnnnnnnnnnntaatatgaatatcgttcctagttaattatatatgtgaatattatttctacagctgattttttttggatccgtgctgcttcaaaacctattcaaccatttaatgtctttgagataaaaataataataacttcaattcttcaaatgtgaatagtacaaattatttgggtaaaatatatttgtgaatcttctacattatacgttaggatgctaagactcacaatttttttaggctcttgctatttacaccccagacaccccctttctctctcaattactcattataccatttttttaaaagaagtataccccttttattttccagaaatgttttttcgaaattacatatacacattccgtaaatgtatttccataacaatgattcatagttatagatatatttctagaataagtatatattttgtaataaaatatcacttaataattaagctgatttacaataaataaataaataaatgataaatgtttatattatacctatatttgttactcttatttttatcctatttgttagaaaacgtgggtgtaaatagtaggagcctttttatggaagaccaacttacattaataatcgtgttattgggacatgtccgtcttcctgatggatcatacgtccaaagctaggcccgctatccactttccatttggatctaagagtgaaacttcttgcactttcatattttgcttggtaatgcaagagggtgcaggaagcaaactctgaatgctatacatgtcacctgtgcattctcttatgcactccttttgacaaagagccagcaagtgaattgctctttattgtgtttgaaactgcctctgttgtacgtgtgttttgtatgtggtgaaactgaaattattcaattttaacgcttttgcttatgataaataagctaatgtgagtatccttttgactgatgtggaaaactttctttcagctgtactgaaccgtgagaaaccaaggagtaacattcgaaaatttatttgcccttattctgtaaattggagttgacgtttgaaagggcagttctggacgaattatcatagggcaccctggataaacaacatttaaaaacattgatctaatcatcagcttaagaatcttagaaacactaataagtgcaaaggggtaagtgggacaagattggcaaaactgagatcacaatgcaatatttaaagggtaaaacactttgttcttacataagaaacaaataatatcttttaaacaagaataatattccttaatatatctataatctataactatataactatatataaaatatatgtaaaggaaatagggtactttagtatataaatttgtatacccattttaataactacaataataaattattgttttatctctataatcatattcacaaatcactcactaacttttattatctttctttttattcaaagagaatggaaaaacagtttgcctgttttctcctagtaataataaaaaatacaaaaaaggagcagaaaaagggtctgaatatcaaccccaatcataattctagaggcctagccgaataacagttttatttattgggtcattatcgacatttatttcttatactctcactttcactattatatcttgtaccttctattatgttctgaaaagactatttcaaaatggtcatttgcattctttttcagaaagcaacacgaggtatatgatataatagtgggactgcaagatgtaatagccctaatgaaatcgatttcataatatgaactaaaagagactctgataatgaccaaaaacaaaaaatcatccgtggaccaaaaaaagttgaaaagagatgcacccgaaagatacaggaattaaaagagaaacttgaaataagtctggcctttcacaagtaacacaatcctttattggaaagttatggctttgtaagtttccttcagtgacctaaactgataagattgaggtatttgttcactatttaaaatttaaattaaattgtatcgaattttttttaaagattaaattgacttcatccattggttctaatacttgaggaacgtattattggttctctcccttaaaacacacgttaagtttttctacttgtgctcttaaaaatcttccgtactatgtgtgtcaaaaagagtgagatggaagaaaaaccaattcatcaattatactcaaagacgttcttgacgcttatgattttatttaatcaggatatggacaatcatgactttcacgattctctgtttcacggcttccacattatgatttacatgattatggcttcttgatctaattcgggtataaaaaaatcataaatacaaaatcctatgcgtttgaatgctttcccattaagatttacacagnnnnnnnnnnggggaggaggtagagagggggatcaaagaatgaaaataataaagattaagatttaatagcagagtatgagattgttttaaatatattgataggtttacgtttaatcctctagttcaatatattgccataatttgttccctgaagttaattctttctaaacaaacttttggttttagtttgaaaagttatatatctgttttttctaactaaatatttcacagctaaagatgagttctatcgtttatgttcttggtgaacgagttacttaggtttacaaatacagttttatgcctgaagccatggaaaagataaatccattaataacttctttttttttctgttggagtggctagaaacaaggataaatatgaaacataacgtctacattgtgatatatgcatgtcccacttccacccaatccatcaattgagatctccttgtccttatcgaacaataaaatgctccctcctcaaatggttggacaaaagcctctccctccaaaaaaaaaaaaatttcatccccaccacagtgccccaatcaaaccctagcaagctaaaattggtgtccaagtgaaccaaccagaaaaccatagagtgaacctccatcataaagacattaaaaattgcccatataagcttatgtatagttttagggatgaattcacctaaaatctccagttttaattgaagaatttacagatcgtctaagcttaaagcatgaatgatctattaatttattctttatttctacttttgttgaaaatgaatttttagaagaaaaaaaaaacttaagatgacaaacataaactactaattattttatttgtattacttcttgttaatgttattctccatcacatatcgtggtagactggtagcttggacaaccaagtgtaccagatgcaattatatctaatgtaacactagttattaagaaattgaacactatgaaatatgaatgagggtaccaatccaaatcgcctgccatattttagtacacctgagagtttaagtgtagaaacgtcttagctccctatttattattaagattttaaaagtaattaaacgatacctgtgtgaaattggaaagatgcaagttgacaaaccaattttgacttgattaaaataaaaaggttcatttagtgtgcaaaatataccgctaaggatttgttgataactaccattcgataatatcttttaaaatttataagcagatcattaattaaattaattcaatacacgtcccaaataaaaatatatctatcatctaacaaattttttctgtaacaagtcccttttacttaatttgaataataacatgactgtgacgacctgaaatgggaccttcaaattaatcttcatttttgtgcatgccaacgccctatgtgtggcgttgagagttgaaccgaaagaaagaagaaaatgccctccaactccgaccacttcctttggttaattcaacgataaataaattcaatggctgccattattgttaattttctttacggttaataatattattgaaggataaaatggctgcagaaaacaagtactaaaattgatgttttattaattggcaccaaagaattaattactactaccttcctccgcaagcattttcaattagcaaaaggtcccccatacgtatttgattgcatcattcataatggcaaaagctagttggctgtttgtgttagcatagaagaatggggcatttcaccgactaatctacggcccaataattttttctgtataaaaagtatcaatcgcacgtcattcttcttctgttttttttcttcttcttgctaatggcatttttctcaaaccttgtccatacggtaatatgacaaatgaaataaatttagttataattaattaagatgataaaaatggataaatataaaatattttaacattaatttatttcctagtgttgtcctttttgtttataggggtatagggtgtaacaatcatttggcagttttgattatgtagactaaaataattttaaatggaaaccctttgaaaatatgacatttaggacaaactaagtaaaaataacggagcaacttgagtttttggttgtatgtgttgatatgttaggatacgtttggatgaggatttgatcaatgacgatagcatcaatctctgtttagttttttacagattcttatttttaaaaataatcatctgacttttaaatgatcagtacaataatttaaccatcaaatgatattattttaatactaaaatatgtaaatttatttattggggccaaattaagccgataccaattacaccctacccaaaagtcactatttcaggctgcacaaaaaaaagtcgttattttagggttaatttatcggtcactagctatttaaaggtgcattcacttgaaactttactcattttctttttcatagggtcactaaattaaatgttagtaatcctgaaatacatatcataatcaaaggacaaaaattgaattttggcatgtcatttgtctaaaaaaatttatcctatcatttaatatattttattatacaatttaattaatttgacatcacatgaaataaaaaaaaattaatggtatatttaatttttttacactgataatgtattattcgacataagaaaaatcttactctaatatctctgtactggctatatatgtagtacatagattaacaagttnnnnnnnnnnnnnnnnnnnnnnnnnnnnnnnnnnnnnnnnnnnnnnnnnnnnnnnnnnnnnnnnnnnnnnnnnnnnnnnnnnnnnnnnnnnnnnnnnnnnnnnnnnnnnnnnnnnnnnnnnnnnnnnnnnnnnnnnnnnnnnnnnnnnnnnnnnnnnnnnnnnnnnnnnnnnnnnnnnnnnnnnnnnnnnnnnnnnnnnnnnnnnnnnnnnnnnnnnnnnnnnnnnnnnnnnnnnnnnnnnnnnnnnnnnnnnnnnnnnnnnnnnnnnnnnnnnnnnnnnnnnnnnnnnnnnnnnnnnnnnnnnnnnnnnnnnnnnnnnnnnnnnnnnnnnnnnnnnnnnnnnnnnnnnnnnnnnnnnnnnnnnnnnnnnnnnnnnnnnnnnnnnnnnnnnnnnnnnnnnnnnnnnnnnnnnnnnnnnnnnnnnnnnnnnnnnnnnnnnnnnnnnnnnnnnnnnnnnnnnnnnnnnnnnnnnnnnnnnnnnnnnnnnnnnnnnnnnnnnnnnnnnnnnnnnnnnnnnnnnnnnnnnnnnnnnnnnnnnnnnnnnnnnnnnnnnnnnnnnnnnnnnnnnnnnnnnnnnnnnnnnnnnnnnnnnnnnnnnnnnnnnnnnnnnnnnnnnnnnnnnnnnnnnnnnnnnnnnnnnnnnnnnnnnnnnnnnnnnnnnnnnnnnnnnnnnnnnnnnnnnnnnnnnnnnnnnnnnnnnnnnnnnnnnnnnnnnnnnnnnnnnnnnnnnnnnnnnnnnnnnnnnnnnnnnnnnnnnnnnnnnnnnnnnnnnnnnnnnnnnnnnnnnnnnnnnnnnnnnnnnnnnnnnnnnnnnnnnnnnnnnnnnnnnnnnnnnnnnnnnnnnnnnnnnnnnnnnnnnnnnnnnnnnnnnnnnnnnnnnnnnnnnnnnnnnnnnnnnnnnnnnnnnnnnnnnnnnnnnnnnnnnnnnnnnnnnnnnnnnnnnnnnnnnnnnnnnnnnnnnnnnnnnnnnnnnnnnnnnnnnnnnnnnnnnnnnnnnnnnnnnnnnnnnnnnnnnnnnnnnnnnnnnnnnnnnnnnnnnnnnnnnnnnnnnnnnnnnnnnnnnnnnnnnnnnnnnnnnnnnnnnnnnnnnnnnnnnnnnnnnnnnnnnnnnnnnnnnnnnnnnnnnnnnnnnnnnnnnnnnnnnnnnnnnnnnnnnnnnnnnnnnnnnnnnnnnnnnnnnnnnnnnnnnnnnnnnnnnnnnnnnnnnnnnnnnnnnnnnnnnnnnnnnnnnnnnnnnnnnnnnnnnnnnnnnnnnnnnnnnnnnnnnnnnnnnnnnnnnnnnnnnnnnnnnnnnnnnnnnnnnnnnnnnnnnnnnnnnnnnnnnnnnnnnnnnnnnnnnnnnnnnnnnnnnnnnnnnnnnnnnnnnnnnnnnnnnnnnnnnnnnnnnnnnnnnnnnnnnnnnnnnnnnnnnnnnnnnnnnnnnnnnnnnnnnnnnnnnnnnnnnnnnnnnnnnnnnnnnnnnnnnnnnnnnnnnnnnnnnnnnnnnnnnnnnnnnnnnnnnnnnnnnnnnnnnnnnnnnnnnnnnnnnnnnnnnnnnnnnnnnnnnnnnnnnnnnnnnnnnnnnnnnnnnnnnnnnnnnnnnnnnnnnnnnnnnnnnnnnnnnnnnnnnnnnnnnnnnnnnnnnnnnnnnnnnnnnnnnnnnnnnnnnnnnnnntttaaaaccacagttaattttctaacctaaaactaaacatgcatgttttttcccttgattataattaaatattaatttaatttaatttgaatgcatattcacggtgtgatttctttaaaacttttataataactaaataactacttaaactcattatctataaccattataatttataaaataaataatctcattttttttagatatttttatccttaatcatataaactatcacgataatttattttaatttttaataacaattacatattttaaaataagttacaactaacaaagtagttttggaataatccctgttatgtattagataaatattagtattttttattgttaagaaatgatttcttataaaaatacaaatcttatttttttttaaaaatcatattacataaatttactccagttaaaaaaattataaaaaaagatttcttcgtttaaaaaatcattcaacaaactttgatttggagatctctaaatctacagcaagaaatgaatgtaagcctgaagtaaagtaaaatcccatagcaaatgataaaatcataaaataatagtattactctgtcatgatgtgatgcctattattcatttgccaagagaattgatgaattaattgattcccacccaatttatttctttttacccagaagaaacaaaaacagagagaatgcacatgtcatcaaatcaagcacgggtggatggcaaagtccaacgttcaaatttgagcaaaattattgaaaccttggccctgtttccgtaaattcatcattgtttcaatcgaaaatcaagccaataatattatattttctcggctatagaaccaaacatgtcccttggcaatcgcgacctcaccccgttccattcgagacgtgtccctgtcgacaacgttgtcccaaacgatacgctccacgtgtacgctcaacaacatagcctactacatgatccaacggacagttcagctaacattttctaaactctttttttctatacaggaaaaaaaaaaaaaaaaaaaaaaaaacatttgtcttccgcaagtagtaacattttttctaacctaacattagcggttctgagatagtgcattggtggttgggtctccaacacaggtcaagggtcccacacggtgtaaagtgaaagctcttttccttcaaccacgttggcccactaagtccccaattactctataaaattccacaccctctcttctcacaaacaaaataactgcaccctttcttttttcttaattcctctctaattatctgcatgctctgcttctctctgaaacagagcatggctcctctcacattctccttcttgttcatccttatctcattcttttcttcatcgtcaggtaaatacatctctcactactcttcttctttcagtttgtattagaatttcgtcttaccaagatgaactctggttgtaattagaaaatagcacttattaaactgcatgtatattttgttgcttcatttcattttgcatttgaaagttgttaactttctgacgggctttgcagaagcgggatcaatcggaataaactatggaagaattgcgaacgacctacctacaccggcgaaagtggtggagcttctgaagactcaggggctgaaccgtgtgaagctctacgacaccgacgccaccgtcttaaccgcgtttgccaactcaggtatgaaggtggtggttgccatgccaaacgagcttctcgccaacgccgccgcggaacagtccttcaccgacgcgtgggtccaagccaacatctccagctactaccccgccacgcaaatcgaagccatagccgtgggaaacgaagtgttcgtggacccaaacaacacgacaaagttcctcgtacccgccatgaagaacgttcacgcttctctagtcaaatacaacctcgacaaaaacattaaaatctcctcacccatcgcactctccgcgctccaaaactcgttccccgcctcatccggttccttcaaaaccgaactcctcgaaccggttatcaaacccatgctcgacttgctccgccaaaccggttcctacctaatggtgaatgcctatccgttcttcgcttacgctgcaaactctgataaaatctctttagactacgcgctgttcaaggaaaaccctggcgtggttgattcgggtaatggtttaaaatacaccaacttgttcgacgctcaaatcgacgccgtttttgctgccatgtcagcactcaaatacgacgacgttaagattgccgtttcggaaacgggttggccttctgctggggactctaatgagattggagccagcccggacaatgcggcgtcgtataacggaaacttggttaagcgcgtgttgagtgggagtgggacccccttgaagcccaatgagtcactcgacgttttcctcttcgcgcttttcaatgagaaccagaaaacgggtcccacgtcggagaggaactacgggttgttttatccaagtgagaacaaggtttatgatattccactcacggcggaggcgccgccgtcgggggttggaaagagccaggttccggtgagcggtgacgtgacgacgtcgtctaagggccagacgtggtgcgtggcgaatggcggttcttcggagaacaagctgcagaacgctcttaattacgcttgcggagagggtggggctgattgcactcccattcagccaggtgccacgtgttacgatcctaacaccttggaggcacatgcttcctacgctttcaacagttactatcagaagaaggcacgtgcatccggcacgtgttattttgatggcactgcttatgtcgtcactcagcctcccagtaagtactgctgctataatcacttagttatatttttatttttatactcatttttatccctataattatatctatgtgttattatttactttataatcttctttacaaactatctcctaacttttattatctatctttttttaaaaaaaaaaacttgaaaacgcagtgagacacaaaatgcctattttcccctgatcaaaataaattaaattaaacatgcattaataataagtaccgactacgtgcaagaaatgttatgttttatttgtttatttcgccctatggccctatcagttgataaggttgaaattgagggtttattattgaatattgattgcttggccctatatggtcgacatggaacggttattttgtccatgtcattgcattaaaagcattaagcatgagtttatattttaattaattttttgttccaagagatgttaataatttgtgttgaaaacgtgtttttgaatttgtgttgcagagtatggtaattgcgaatttcccacaggatactgaaattacggagatggagtgtttttggtgaagccttgatttggatttaactggatttcgccggagtttttaggagcttttccattggtagcacgtgtttaggcttggagaaatatgcgttagcgttactgtttgtaataaatcattatgatgattactttggggggttattgatttcttttactcatttatttgtaattatctctattttttcaaatgaagaaaaatatagaatacatttttttttacttgtgtttctactttacgtttctttgaaggatccatttcttctactcttttaaagcattcataacttcttgttgtgcaagttattatagcaagcaatgcaagcttctttggaatgtctatcatagtttttatttattcaaacgggtactaccctacaaacttttattagactacaccatacgtcaaacggaggctaataactaataagctccctaaattgttaacataaacaaaaattaatgactatatagaaacaaattgatacgttgcctttgaaagagcatatgttaattataaggacattaaatatatannnnnnnnnnnnnnnnnnnnnnnnnnnnnnnnnnnnnnnnnnnnnnnnnnnnnnnnnnnnnnnnnnnnnnnnnnnnnnnnnnnnnnnnnnnnnnnnnnnnnnnnnnnnnnnnnnnnnnnnnnnnnnnnnnnnnnnnnnnnnnnnnnnnnnnnnnnnnnnnnnnnnnnnnnnnnnnnnnnnnnnnnnnnnnnnnnnnnnnnnnnnnnnnnnnnnnnnnnnnnnnnnnnnnnnnnnnnnnnnnnnnnnnnnnnnnnnnnnnnnnnnnnnnnnnnnnnnnnngaatactatcaaaggacgaaagctttcatcaggcattctaactcgaccatgcgagtgatgttgtcaatttcgaaaaggaaactatcaaaggacactataatctatgtagcaccgataccgacacggtgttttcgatacggaacttcgatacattcttcaaaaattctaatatttcgatacgtttccgatacgtcttagtattaaataatttttttatatataaagtgcatttcatattaataaaatataatgaaaggaaaatcataaatacaaataatagattatccatacaaatttgataaatacttcaactatttgatggacttagagtgctactaataacatttgcctccaactgtggctcatctagggaaagggtaacgccatctaaagctccaacatcattaaaggtatcaactgcatctccactaatgtcccaatattgactttctccttcattatattttggagtctttcttgataagagccggaggttgctatgtatgtaaactaagtcttcagctcgtttgggatccattttattcctcttcatggaatgcacaaaagagtaagtactccaattgcgttcagcacatgatgaagacgagggttgtgcggtgagtttcaaagctaactttttaagcaaaggtgcactacaaccatgaactccccaccaatcattggggttcattgtatatcgattttcgatagcctcaaattctctaaagcctcctttcatttgaacaaagttgatatactccaaatttactgtagccctttcctccacactagaaaaatgtctcctgaagaacttttttacttctaaattaatctccacatcattatctggagaaactcgacttgggtcttcagcaaccctttgatcactgtagtatctaccaaaataaaaaaattagaattcaaaatggattcaattaacataattattaaactaagttacaattataaaaaaaacttacttgggatgcaaagcatgtgccaaacaatgaaggggagttgaacttttggtccaccaatctataagaatatgatacaccacatgaaaaaatgttgattcctcaccgttcatccgcccttcttttaggtatattacactctttaccttctcaatcattgcatcccacatatcataaaccaaatgaagacaaggtttatcagtatcgcaaaaccttatcatatcataaataggagcagtgaaagcaaggatgtaatcaatgtttgcccagaactcatcatccaatatcgtttccttcacaaatcttgcccttccttgatgatcatctctatagatactccatttttcacaaataaccatgttttggaggccaccctttatcaacttgaacctctttagcatcacaatcatggaagcaaatcgggtgtcagcaatagaaagcaacttcaatggtacaaactcattaaacatggacaatctcatagaatgagtcatgatgaaagtcttgattgtggaaacatggccaacaatatcagatatccaactacattctccataagtaatctcattattctccacatttttggctgcacaaatgttcttcaaagccaaattcaacgtgtgaacaacacatggtgtccaactgatagtcggatattcttgctcaataagttgccctgcacccttacaattagcagcattatcagtaattacctgaaccaccttctccaccccaacttcttgaattacttcctttagtaagttgaagataaaatatttatccttgatatcaccagaacaatcaacacttttcaaaaacatggctgcaccgtcacatactgccatgaaattaattattggtctcctttgggaatcactccacccatcactaacaatactcacaccatttgttctccaaagagatcggacagggatacacaacctatcaatattatccttctcctgttgcaaaagagtagttcgtaacaagttatagccaggggggcgataacctgaagtcagaacaaaaaatagttagaaataagggaaataaatgacataaaaacaaacataatatttcataacattaaatacctccaatgttatgacttgcagcataagtgaatgcttgttgaaagtacgggttccttgccaaattaaatggcagtccagcagaataaaacatccgagcaataatatgatttaatccttcccgctctcccctattgaaagccctctccagaggactcatgcttgtagtttcttcatcacttctttttttttttagcagatgtactagttgtagctgaaaagctagtgggtggtaaaggaacatgtctcggcgcattattcctcacccttttagaatattcctcttccaattttcccatttccatcaaagatgcctccttaacactcttacatattccaatccctttacatttaatttttagcaaatgagtctttactctcgtgtatgaacttctatattcaagtttgcaaaagttacacttccaattcatattccctcctgcttcatttccatccccaactttagtaacataattccacaatggcctgttcgagttttcaacttcagtttccacattttgtgcattggattgtattgaactattgctttgattaatgtttgactccattctattatgttaaaaaaacaaaacaaaatcaaatttaaaaacataatatttacttttaaaaagaaagaaaaaataattcttttacaatacaaattgtttttaaattgctaaaaacagatttaataaaatgatgtaaaataacaaagcaatattatacgatcacaccaaagaatcaaatgttagttaaaaaaaaatttaaaaaagtaattcttaaacggcattctacgtatgagcatcatgtcttaagaatatttaactattattaatttaggcatatcaaatcagcactataaaataagtaaaataaaatgatatgaatagggaggattgaatgataacccacagtacaaattgaatgataatataaataatataaatcataaaagccacatgataaaataaaatgtttaaaataaaaactggtaatataaaattataaatgatataaaggagctttgaaaagtgttgaggaggaggagcaggttcatttacgtagaagttataagaaagagtggctatgaaggtgcagtgcggcggagagagaagagtgcggcggagagagaaggtagcggagagagaagcagttagcacttagcagtgtgcgagagagagagagctatgcagtatgggcttacggaggtggaggagcagcaacggcacgcggaggagtaacggaggaggagcagcgacggcacgacggagcaatggcttgcgattttcagaacagagcaagaggagcagcggcttgaggcttgaggcttgcgatcgaaagaggaagcacataagtaaggcacaaatcagaactaatttaatttagggctttttttatcatttacaaatctgtccttccaaaaatttggatacgtagaaatccgatttttttgcgtacccgtccgatacgcgtgtccgatacgttgggaaaaaaattttccccgtatccatgcaatgtagactataatctataataaattagtgaatatttaatttgacttattctagtgaaataattattttttttcggtcatctacaaaccataggtgtgttatgcaggaattctggtgagagagtcagatgtgatgtctatcattcaacgaaataagttgtatttactaagggttaatcgacaaaaaaatttaccctttctcaagttgtttatgttacacgattggtgtctagtggtcatgaactcaacccatggtaattacggacggagtaagtactcaatctatataagccttcacaactcgttttttttttttggaaaatatgtaaaaattatattaaccaaaaataataattacaagtactcagggcatcccctagctacacaactaaaaactacaaatactcaggacatctcctggctaaacaaaaaatacaagtactcaggacatcccctggctatacaacaaacacctgaaagagagctagacatcacttgctaaaaagaagcaaatgcgctgaaccggaaaaacaaccgaaaacccaaaaagcaaaagtcatttgctaatacaagtgagtcaagtgggcatatctaagaactctaaatttaatcctatctatcaagtctgccattacaaaagtatggtggtcaaaaagaattctattcatgcaactccacaaacaaaaaaccatagaagccaacgctaggcacctaaacttcccttacaagcctgtggttgccctgaagtggaccaagctattaagagtgccctgcaaagatatgttcttcctaggaaaatttgcccaatctattatctcagcccaaaccttgagaactattctgcacttaaaaaacacatggtcatttgtctcgggctcgagctggcaaaaacagcaggtagttcctttgttaaggaaaggagctctatccaaagttagcatcttctgacttgctgccagccacaaagagaacgcttccttcggaggattagaagaggaccaaaccactttcgaccagtacctcttgggattcggcacccccaaaataattataagcagctgctgtgtcaaatttaccatgcagattccccgaatccagcttgttgtttgcctgctcagcattgccttccatagtaaccagcttgtccctaatgctgaaaatcatctttagaagggctgaatcggatttggtaccaaaaacctgccagaccgagttcccctttaagtagtagtgctgaatccatctaacccataaggtttccttaccagcagcaatgtcccacaacaccctggccagcaacgcacaattccaatctttcagagcacggaggccaagccccccttcatcctttggagagcaaacagtcttccaagccacgcggggttttatcctgcctaactcccctttaccccaaaggaaattcctgctgaaagcgtcaattctgttaatgaccgtcaccgggagagggaataaccccatccagaaattcaccataccccttatgactcctctgatcaactccaggcggccagcataggataaagatttcctatgccaattctgaatgtgacttccgattctgtcaagaggagagtaatgacatatattgagtcttgaggccagcaggggaatacccatatagcgcacagggaaggaaccttgtccgaagcccgttagagttaagagatcagccaaagtgatgctgtcaataccagaagcaaatatggcagatttgtcttgactgatagaaaggcccgaaaacttacaaaatcttatcagtctattgaaaagggtagcaactgaagcatagtctcctctggaaaacatcaccaagtcatcggcaaaagcaagatgggtaatattaagaggagcacagctaggatggaagttgaacagcaggtaatttttaagctgattaaggtctcttgagaggaattccaaacagatcacaaagaggtagggagataatgggtctccttgcctcagccatctcctgccctcaaagtgcccatggatacggccattaacagaaatgctgaaggacgttgtggaaatgcactccataatccagccaataaaaacaaatgggaaacccaacacctgcaacatccatctcaaaaaatcccacgatattgagtcatagtctttgtgcaaatccacatttaacatgcatctcggagaatttctctttctagtatattttctgatcagctcttggaccaagaagatgttatccgccatgtttctagatttaacaaaagctacttgagctgggtcaataatagattccagggctggcatcaatctatttgcaatcaccttagagataatcttatagattaagttacagcaggaaatgggtctgaactgggtcactctggtagcattttcagtcttgggaattaatgcaatgaaggcatgattaatttggcggagaatccttccaaaattgaagaattcctgcactgcagcaacaacatctccccctatgatggaccaagccttcttaaaaaagagagcattgtaaccatctgggccaggtgacttgttgttgtccatctgagagacaatgctccaaatctcctcttgagaaaccggcctgaggagttgggggaacagatcaggagacagcttgggaccaacgtcacagacatctaacaaaggagggtcacaggtcgacctagaaccaagcaaggtagaaaagaagttgataaattcagccccaatttcctcttgagatttggtgctgcttccatcttctcggatgatggctggaataaaattggtatttctctttttgttaaccagcgaataatagaatttggagcttctatcagcctccacattaaatttgttctttgttaattgggctatcttatgcgattccgcaattatgagggctagaatattagctttgactgtagcaatgttaactaggatactttgatcatgagggttagcttgggcccgaagcagctcaataatgaaatcagcttctgctctgtcaatccgagaagccagatcctcaaactccttatgataaaacttcttcaatgcaggcttgagcatcttgagctttttacaaagctgatacatcttacaacctattatctctgtcatccagatactggccacagtaggaaggaagtctttacaatcaacggtagcattgttaaatctgaaagcactatgccctctatgctgggcaggtcctaagtgaaccaccaaggctgcatggtccgaaattgagagaaaatcagcaattttaacatgagagaggctgaaatcagccatccattggtggttacaaagggctctgtcaattctactccaaacagaaccattggtccaagtaaactcattcccaacagttctcagctgaagcagacccaactctgaacagcagctgttaaagtcagccatctcatagtccaacactacagaaccattccatctatcaccaggagaacgcacactattgaaatctctcatgatgatccaagggccttgcacttgattggagaacatctgcagagaatcccaaagttgtcttctttcagtgatgaaatgaaggccatacacaaaggaagcccacccttgggacttagagattttgcaagcaaataaacagtgaatgccttgggggttagtatccagaatgttcaactccactctatctgttctccagagaagtaaaattctgccagctctatgctgaaggaaattatgagcaaaagaccaccctttaaatcttttattcaccaaggaggtcaagacattggcatccaacttggtttccactaatgccacaatatccacatcaatggatctcaaaaagttaagcaccgctcggtgcttcaggggcatattgaagcccctcacattccatgaagcgataatcatagctttatccgggaagaacccttcccatcaaaaggcatataagccttcacaactctttagtcccaagcctagagggcgaaaaaggtttgcttatttggtttttcaatgtgaagttgggtaagtgttcgacctataatttaagagggtccacacccaatagcctttagaccaaagggtggtaatgttgcaaaacgtactcaatgactttgtgttctatcttcaatttctttaggacaacagtgatttggttaagggttattgttgatatttttgcttatttttattacattgtatttccttcttgttttgtcaaatttttatctcaagcagttttattgtcattctaatgagccgattagcaaggagctacccgtcaacattttagagaaatcggcccaaatcttattgtgccaatttttgttcgtctcaggtgatgttggactttctttagtcgccatgttatattcaaccaaaacatgttaacgagccccaggcccagtttcacataatcttaaaaaacattttatttttttagtaatattatatcttataatttctgttgaaagaattggttgccaactaaatatgttcaagaaattgggacatatattattataaattaagtgtattttaaattttagataaaagaaaaaatataaaaaaataaacatgaatggttagttttagtataacataaaatttagaccaaaagattgaaaatacttaagattattagaaattaattctacaaacttctttttcaatgcaaggacttaacataaatatttaattttagtgtcctcatttatattttctaccatacacaaaataatccaagttttattcttaataaaatttcatcatatgtatacaccaaagaaggaaaaaaaannnnnnnnnnnnnnnnnnnnnnnnnnnnnnnnnnnnnnnnnnnnnnnnnnnnnnnnnnnnnnnnnnnnnnnnnnnnnnnnnnnnnnnnnnnnnnnnnnnnnnnnnnnnnnnnnnnnnnnnnnnnnnnnnnnnnnnnnnnnnnnnnnnnnnnnnnnnnnnnnnnnnnnnnnnnnnnnnnnnnnnnnnnnnnnnnnnnnnnnnnnnnnnnnnnnnnnnnnnnnnnnnnnnnnnnnnnnnnnnnnnnnnnnnnnnnnnnnnnnnnnnnnnnnnnnnnnnnnnnnnnnnnnnnnnnnnnnnnnnnnnnnnnnnnnnnnnnnnnnnnnnnnnnnnnnnnnnnnnnnnnnnnnnnnnnnnnnnnnnnnnnnnnnnnnnnnnnnnnnnnnnnnnnnnnnnnnnnnnnnnnnnnnnnnnnnnnnnnnnnnnnnnnnnnnnnnnnnnnnnnnnnnnnnnnnnnnnnnnnnnnnnnnnnnnnnnnnnnnnnnnnnnnnnnnnnnnnnnnnnnnnnnnnnnnnnnnnnnnnnnnnnnnnnnnnnnnnnnnnnnnnnnnnnnnnnnnnnnnnnagtatatgaactttttatagactaagtatattttccggtcagagttaaaattattctttggagacttaaatatatttttacttctataatgcattgattgtttttttttccttataatttttttaaaaaataatcattgtaagatttctcttctttattttggtgcttgttattgtaatatgtgattaatttgcttttagtccttaacattattccaaaataactaattaaaaattgcaaatattatgttattttctaccaaaaaaattaataataatactacaatgatcaaacaaagaaacaatatatagcagaaatgtaaagcatatttaaaccatcttttgaaatattacattttttcaatgaatatttttacattcacacaattacacaaatatggggaatcgaaatcttaaatcaacagacattctatatttttttattagtaaggcgcatattatctatttaacgtgggtattttctaaatcataccgaataatcaatgaaaaattgcattcacgcaaacgcagaagaccagagaggtgtacattttgtagcctagtgtccattcatttttcttttttgctaaggaacttacgaatggtacaacataaagataattattttaggctaaattacatcttttaaattatgacatattgccatttttatattctatctttatttataaaaaaacataattaatttttgaattttaaattttctcatataatcctgtttattagtctttcacgatttttcctggcaagtattgatttttgttttagttttttttaaatattatgaccttttatcttatctcttatttttatttttcagagtcacataaacatttaacaaacaatataaacgaaaagggtttaaatgagagactaaataatttctttaaaaaaataactaaataaaaacttgtcaacaacgtcaatgtttattaccagagttaaaaaaaaaaattactttaaaaacgggagacacattcattagggcagggtttagtctattatgacatgtgcatccccatgttcaaattaggcagcttttagtttctgatattttaggagaccagactccccgtgttatttgtgtgtagttttagtttgggtttggaccctttgccttccaaaaaataaaaaataaaaaggtttaattccgtttccgtcaataatgagtttttgcatctgttagtagtatttaataaagctaattctggaactttatgaaactaattgaaagtttagggtaatctaattagttagatttaaataagcaagtcgaaggtgagagatgattggatgaagaagttggggtggtgtgagcatatgatattattattagtaggtgttggtgcgttgaaagaaacaataataaaagcgtaaccgaccacacccacccaaagccaatgtattgtattctggataagcacgaaatgaaaatgttcttgttgttgttgcgtaaccaacaaaatgcgcgggtgtatcattttcccgcgcgcgcacgagtccaccaaaaccaaaaacaacaaataaaagaaagagtttattattaatttagtgtctaaattattttaaattttaaatgtttaacttaatctttaaatttttaaaaataatttaatccttaaattcttaaaaataaattaatttaattttcaattttttacaaaattaaaaatgaaataataataattaagccatatagaaaagacaaaagcctgtgaaagagaggaaaggattggacttgacttgggcatgattcgatgaatgaatgaatgcgtttcccgagcgagctgctgcaactggcgtgcgcgtttcgcaagaaaataaaaaacatgcgttgccttgcccaacccaaatttccagaggagtccccacaactctctaactctctttgtctttgcttcctagttcctacccctttcctttttctacttctctctgtcctcacatcttacaaattactatcgttaatcttatcaccttttccatcttctgcagtaatatgtaacaaaattcaaaaactgcgggaaatatgttgatacaaatatgaattcaatatatttaactaaactcacgtgaaattcgttcagtaataaatgttggatcacaagtgtatttatttttaaattttcaatttctaaaatatatttaaatgacattacgtttaaataagatggtatgaaatggaactttataaaatatattcattttgttttttttttttttaaggtatagaatcgaacaactcttannnnnnnnnnnnnnnnnnnnnnnnnnnnnnnnnnnnnnnnnnnnnnnnnnnnnnnnnnnnnnnnnnnnnnnnnnnnnnnnnnnnnnnnnnnnnnnnnnnnnnnnnnnnnnnnnnnnnnnnnnnnnnnnnnnnnnnnnnnnnnnnnnnnnnnnnnnnnnnnnnnnnnnnnnnnnnnnnnnnnnnnnnnnnnnnnnnnnnnnnnnnnnnnnnnnnnnnnnnnnnnnnnnnnnnnnnnnnnnnnnnnnnnnnnnnnnnnnnnnnnnnnnnnnnnnnnnnnnnnnnnnnnnnnnnnnnnnnnnnnnnnnnnnnnnnnnnnnnnnnnnnnnnnnnnnnnnnnnnnnnnnnnnnnnnnnnnnnnnnnnnnnnnnnnnnnnnnnnnnnnnnnnnnnnnnnnnnnnnnnnnnnnnnnnnnnnnnnnnnnnnnnnnnnnnnnnnnnnnnnnnnnnnnnnnnnnnnnnnnnnnnnnnnnnnnnnnnnnnnnnnnnnnnnnnnnnnnnnnnnnnnnnnnnnnnnnnnnnnnnnnnnnnnnnnnnnnnnnnnnnnnnnnnnnnnnnnnnnnnnnnnnnnnnnnnnnnnnnnnnnnnnnnnnnnnnnnnnnnnnnnnnnnnnnnnnnnnnnnnnnnnntaatcaatcaatatattcttcaacattattgtcgttcattccttatgtaacacttctcactttgcatgcagtggaaaatttagaaccttaagttaaaaggagcaacctatttttgaaataaattttaataattatttacaataaaaggaattggaaattaaggggtaaaatatacatattttaaatattatgtgtaattttttaactgattagagtgcggatcttccattgtctctgacaggagttacataaagtgaaaccttactttaatttgattcacctacttgagttgatcatatatctttattttctatatatattcttaatatacatttttttactactgttaaaatatttttagttttgtattttaatttatatttttatatttaatatatattgacaaatatttgtataatattttaatatttcttaattattaaaaatgtaatagaaggacatgtataggttttcttttccccgatcgggtgcattcaatcgtgcggacacattcatacttccaaattatgacaaaaattataatgggtactatatattgacattaatgtcggaaagataaaggttataagtattgttattgtaagtttgtaactagatcgtgatttaaaggaatgagatataggttaagagtattaaagtgtgaaagtttaatcttcaatgttaaatatagaaatggaatgagatataatttaagagtattaaagtgtgaaagttttatcttctatgtcaaatgtagaaatacatataggattatgttgtaattatcaacttgataattttaagagggtctattttatcacaactttattattgtgtatcgagattttgtggaatgacttgtgtaagtagtcaagtttacttaacattggagtttactgtacgagaccaaaatatgtctcataccgtgtgtgagtaattacaaccgttggatcgtgttatttttattttattttacttttttttcagtcatataccaattggtccttcttcctcccttcactctccgacccaactctggcgacaaattccgcttccatcccttcatcttcctctgccgcctcccctccctctcctagtcaccgcgttcgccctcccagaaaaatccaggtgcaccgtgcacctcccatcaaacgtgttggtgttgtcatggtcgacggcgacagagggcgatgagaatggagcccgaatgtggagacgggaacgcagagagagaagagagagaaaaaagaaaaatggtagaaagggaagctaatcaaagaacgataaataataaaaaaaataactatttaatgaaaattaaaatcgatccagcggccaaaattattcacgcactgtacagacatgttttggtttcgtatcgtagactctgtcttacttaatagtcaagggttggatgatgtgtaacggatacctaactagtaatttcaggaaactggtcgaaattcgataattagtaaaactgtggaagtcatcatccaatcgaaaagatcaaagaaatataagtctaaaatagtttattgatcaatttatatatatatatatatatatatatataatgtagaagaaggagtaaaatagtatgatagtttgtttaaattttaaaaatatttttttataagtattttttaagaaacaaatatgttttatttctaaaaaatatttatttaaataaaaataatttggacaaacacatcataaaatataaaactatttattttatttgaaaacatacttattttagaaaaataaatttaaacaaactagctcaatatttgaggagattaaataactttctagtttattttattaaaaaaaacagtttgttaaatatgtatgtttggtaaaagagtttatttgaatggtctatattgttttagtagtatttcatatagcgtttgaggttataacttcgtaatttattttcttcttcactactatcttattgtaatccattttttaatgtcttttaatgtcactttatatatttatcacctacttagtttaactagtagttttgtacaaaatttaaacgaatatttattaagttaaaactataatatttatttatatttctttttactaattaaatttttaaaaaaatatatttaaatttcctttaccctacgtactgatgcatgtgatgaaaaatagttcgaaattaaattaaagcattttaaactagcaggcatgttactgtgcttttgaatagttgtatctttttttatcgtgcctttgacaattgcaccgtctatctgaaatggtagatgctttaattactgtttactttaaaaagaaagctgaagaaggggaagagatgctaaacgtaccaattgttcagtaaaatccagtctggtgaatttcttacccagaaannnnnnnnnnnnnnnnnnnnnnnnnnnnnnnnnnnnnnnnnnnnnnnnnnnnnnnnnnnnnnnnnnnnnnnnnnnnnnnnnnnnnnnnnnnnnnnnnnnnnnnnnnnnnnnnnnnnnnnnnnnnnnnnnnnnnnnnnnnnnnnnnnnnnnnnnnnnnnnnnnnnnnnnnnnnnnnnnnnnnnnnnnnnnnnnnnnnnnnnnnnnnnnnnnnnnnnnnnnnnnnnnnnnnnnnnnnnnnnnnnnnnnnnnnnnnnnnnnnnnnnnnnnnnnnnnnnnnnnnnnnnnnnnnnnnnnnnnnnnnnnnnnnnnnnnnnnnnnnnnnnnnnnnnnnnnnnnnnnnnnnnnnnnnnnnnnnnnnnnnnnnnnnnnnnnnnnnnnnnnnnnnnnnnnnnnnnnnnnnnnnnnnnnnnnnnnnnnnnnnnnnnnnnnnnnnnnnnnnnnnnnnnnnnnnnnnnnnnnnnnnnnnnnnnnnnnnnnnnnnnnnnnnnnnnnnnnnnnnnnnnnnnnnnnnnnnnnnnnnnnnnnnnnnnnnnnnnnnnnnnnnnnnnnnnnnnnnnnnnnnnnnnnnnnnnnnnnnnnnnnnnnnnnnnnnnnnnnnnnnnnnnnnnnnnnnnnnnnnnnnnnnnnnnnnnnnnnnnnnnnnnnnnnnnnnnnnnnnnnnnnnnnnnnnnnnnnnnnnnnnnnnnnnnnnnnnnnnnnnnnnnnnnnnnnnnnnnnnnnnnnnnnnnnnnnnnnnnnnnnnnnnnnnnnnnnnnnnnnnnnnnnnnnnnnnnnnnnnnnnnnnnnnnnnnnnnnnnnnnnnnnnnnnnnnnnnnnnnnnnnnnnnnnnnnnnnnnnnnnnnnnnnnnnnnnnnnnnnnnnnnnnnnnnnnnnnnnnnnnnnnnnnnnnnnnnnnnnnnnnnnnnnnnnnnnnnnnnnnnnnnnnnnnnnnnnnnnnnnnnnnnnnnnnnnnnnnnnnnnnnnnnnnnnnnnnnnnnnnnnnnnnnnnnnnnnnnnnnnnnnnnnnnnnnnnnnnnnnnnnnnnnnnnnnnnnnnnnnnnnnnnnnnnnnnnnnnnnnnnnnnnnnnnnnnnnnnnnnnnnnnnnnnnnnnnnnnnnnnnnnnnnnnnnnnnnnnnnnnnnnnnnnnnnnnnnnnnnnnnnnnnnnnnnnnnnnnnnnnnnnnnnnnnnnnnnnnnnnnnnnnnnnnnnnnnnnnnnnnnnnnnnnnnnnnnnnnnnnnnnnnnnnnnnnnnnnnnnnnnnnnnnnnnnnnnnnnnnnnnnnnnnnnnnnnnnnnnnnnnnnnnnnnnnnnnnnnnnnnnnnnnnnnnnnnnnnnnnnnnnnnnnnnnnnnnnnnnnnnnnnnnnnnnnnnnnnnnnnnnnnnnnnnnnnnnnnnnnnnnnnnnnnnnnnnnnnnnnnnnnnnnnnnnnnnnnnnnnnnnnnnnnnnnnnnnnnnnnnnnnnnnnnnnnnnnnnnnnnnnnnnnnnnnnnnnnnnnnnnnnnnnnnnnnnnnnnnnnnnnnnnnnnnnnnnnnnnnnnnnnnnnnnnnnnnnnnnnnnnnnnnnnnnnnnnnnnnnnnnnnnnnnnnnnnnnnnnnnnnnnnnnnnnnnnnnnnnnnnnnnnnnnnnnnntgatacatataagatcattaatttgtgtattaccattttgcatgtgcccaccgaaaatagatatacttcacatatgttgttacaacaccaatcattttaaaaaaatagtaattaataatttttctaataaaaattgcaaataaaaagaagaaactttatggataattattagaaattggcgtaaaatatctcgaaaattaaaatctatttcttgtagatgaaggaaatcgtatttattcattaggatttaacttacagataggaacatccatgtgtttccgactttgcgtctgaaaataagtacaattcacataagtaattgcactatcgcttatatcaataaaaagttagttctaaccacaaattagtaattatcaaagttcctataaaaaattacaaacagaaaggattatgctaaatgtgaatggcatttgtgcacagcacatccaacgtattggctctcagcctaaataattaaaatgaacaaaaataaaaaataaattaatttccttttagaaaataaaatttatggatcattattagaattggcctaaaatctctccaaaatcaaaatctagtgatttagtggaaggaaaatgtatttagttattaggttttaacatataaacatacagatgagatcatttgtgtattttttactttgcgtgtgcttattgaaaaatgcatagttcacttgagtaattacatctttgattattctaaaagaaagttagttcacaccactttctttcgctgaataattcacaccactaattattaataaataaaagtcatatcgaaagatacacggaaaaaagataagtatttggccgaggacaataaattgacattgtttattcttctgatttttagcaaaaaatgaaactacaacattaagtattaattatgtggaatatgtatttttaagtaagtgagatacttcttgtacaaaaaaaaagtaagtgagctacttaaccgcattgacaattatggattaacgtaagcatttttataatttttaaaatatcctaaactaaaagatttgtatcgcttaattgagaagtcttaaaattgaagttcatgtttttgaaactaagatggaggctattaatatctatttaaaattactggactgtttgtttttgcttggactttttttccctttatcatatgataataataatgtagaatcataattcgtaaaaattaagatcgtgtatatatagtgttagaaaatacgtacagtttacaccaataattacactgctgattattttaaaatatagttagttcacactgctaattagtaattaataaagttcttatgaaaaacaaaaataaaaataaacatttaagcggctataaaaaattgcaattacgcatggcacataattcgcttcctcgtccacagccgaaataattgaaatagatgaaaagaaaataccgtataaactaatttctttataggaaatcgatcgaaatccactgcttcatagaaaggaaattagtatatttatttattaaaatttaaaacagagataagatcttcatctgttgcatttatgtttacccctccctctgtgtgtgccccctggaaaaaaaagaagaagaagaagaaataatcagaggtatgctatcatgaaagggacctcaccaaatcaaaagtacaccaaccaaggcaaggcaaatttacctccaagaaaccccaagggccttctcgtcatttcgagaatcccttaactcactcttcgtaatttgtaaacgagaaaaatacataaaaaacagagattctttttataaaataatataacagaagataaagcaagacaagaggtcagttagagaaggaaggcagccagaaaggtaacaaagaaagagtctatttttaaacacctcctaattttgaacaatttatcaatattttttattttttctcatcatattattattattattattttctttctcttccgtgttaactagcatttgagatgttgacaaatattttccataaagaaattaaaataaaaagctatttatttttataaaaaaaatggcattagatttagagagacagaggcaggaaagccattgagagaagaaaaacgcgaacacgctgaagaccgattttttgtatttgtattatttattaagaatatatttgagtgtgtgtagttgaaggagcagaagcagaagaagtgaaggtggtaccgccttcaatcctttctctctccatttctcatccccatcatcttattatacctcttccatctccataacacccacttgtgaaaaaaacccattaatatatatcacactcacacatacatacacacatgtctctctgagctccaatccaatccaatccaatccaagaccacaccttgtcgtgtcggacgaacctcggtgtctgtctttttttttttttttgtttcattaatttctccgaagagatgcggaagggcagaggaggaggagcctcggctgcggcggtggtggtggcggaggtgaacggatccgttttaaaggagcctcggtaccgtggcgtgaggaagagaccgtgggggagattcgcggcggagatcagagacccgttgaagaaagccagggtttggttgggaaccttcgattctgccgaggatgctgcacgtgcctacgacgccgccgctcggactctccgaggttccaaggccaaaaccaatttccctctctcacccttttgctatcaacaccccaccaccgatcctttcttctacgctggtttccacgaccaccaccaccaccacaaccaaaacaacaacgacaacggcaaccttaacaaccctcaaagaccaacttcaagtggcatgagtagcaccgttgagtccttcagtgggccccgccctcccaccacaaccactacgacgccgtttttgaccactacgcggagatacccgcgcactccccctcttgtccccgaagactgccacagtgactgcgactcttcctcctccgtcgttgacgacggcgacgacaacatcgtttcctcgtcgtttcaacctcccttgccgttcgatctcaacgcgctgccgtttgatgatgatgctgccgccgcgggtgatgatctacgctgcaccgcgctttgtctctgatgattatcgtgcgatgatgatttttaatttctcattattttttatctcttcaacttgattttttttgttattgctatgcggaaaaaaatatattaaaaaatgatgatcagatgtaagattatggtaatatgatcttaattctgtgagaggcagattccgtgttgggtatattattttcttctttttactatttattttttaaatcattttatttgaaaggaaatattgaatgggaagaaaaaaagagaaagtaattatgatctggttgtttgaaaaacaagatgaatttgtgggtaatccaatgtgggtatgtatgtaatctccgatcctcttctctttgtttctatgcatcaatttatcatagttaagaaattcagtgttgctctaacacttagattttgttatttctctttactattttttctttacacttggaaaatcaattcgttattttttggtttggttctttttgccttcattagctgaatttccaatgtttgaatgtaacgccaatttgaatttgattgatttcatgtaaattgttacatgatgagggaaagccaatgcagctttgccggtaccgaaaggctttttattgtagttttgattatttttattttcttccttacctttatgaccaagtgtaagcaagagcgctttcaaagaaactttgtttggtgagtggagtgattatttgttgttaccttttcttattttgggagcaattgcaacaggaaaagaactactatcattttgcctccgatggcactcaagctgtttggcagcgtgagttacttagatctaggtgtgaatggttggatttggacgggagaaaatcgtttctttttttcttcttttgtggtatcttgtaacgtagtaatttcggttgtgtaagaaaagaatcaatgcaatctaaatgtcaccgttaatgtttctgtttctgtttttgtcaagccctgcatatggttaagttttagagcccaatctaacgttacgagtaaaaaaatagggctaagaaaatataatatatatatatatatatatatatatatatattgtattttcgttcttccttggtatcaaaaggatagtggaatacggtgttagaagtttgaatgatgaagcattaggccaccttgtgttgtgaggtgttgtatgaaggggtgtttggcaagagagaaaataggggtttctttgcatattcctaccccacttaatgaaatgaacgtgacacttctagaagccgcggggatggtaggttgtgtcttgtttttgttttgaagaagcatcaagcatagcataaaataaggtgcaatgttagagatttgtgaaaagtcaacgccagcttaaacacgcactcaccgtgtgaagtgacccttcagaactcaatggaggcctaatgtaatgttgcagcctaaccaaccattcctgcatggccacctaggtgcccctcaccttaccactcattatttccttgtctagtaatcatactcatacgtgatatctctctctatgggattgattaacgccacacaacttcttgtagagaaacatcaattggtgagatcttagtaataagttcccaacaaattgttcttctccctttaattgttaacttgtttcacctcccgccattaaaattgagaatttattacatcattttggactattctcatcccaatgttatgtgtgagacatataatcaagcttatgactcacaaaaaaaacatataatcaagttttattattatttttaattgagaatcttggttgtgtgaaaattgacctatgatgatcccaaatcatacaaaaaattctccataaatttgggttgaaaatcactctataacgcttaagccataaaaagaaaagtaacttgtgctatggctgtcaaatttctcttgtttaatgctatgttttttttacccgtttgtttaatgttgtgtgattgtatgctcaattgctcattaattaatatttgtatatgaaattatcttggatgactacgattttctttttaaataagtaaataacatgactaggcttagatgcactaatattttcccaaatcaaaagaaggaaataaagaatagatttggtgatgggaatcatgttctgaaagacctagaattgtgattagaggcaactcaaaggtagggtaggtattcaaatttgttaataggaagtgtgttagggtttggaccacgtcttggttggggggcatttttctcaacaatgtatgtgcctcgtttgctctagtattgtcttaccttcaaattaggggagttgtcgctggcagggtccgcaacacatcatggcctccattcgcatcatatgctctttacttaaagaaaaagaaaaaataaaaactaagtgggctgattaacttgccccacaaaggattttgaagcccgtgacatgcttccacataacaaacactgaatgtgaatcaaagtccacctcagaacaaaaaaaaaaaaaaacaactatgaaaacaatctaacatttaaaatatcgtcgaagacactataagagatttataaaatactcaaccaaataagttagatcccttaactcattcggtattttttaaggcatcgtagttgcttataaaaaagaataaaaatgcaatagacaatgaagacacgaaaaataacaatatattatggaactgagatactacccaattgatcttcaaatattatgcaccacaaatttttagcaactagtaagtatctccttcatacatcacaaggtgtccttaaatacgagtgatannnnnnnnnnnnnnnnnnnnnnnnnnnnnnnnnnnnnnnnnnnnnnnnnnnnnnnnnnnnnnnnnnnnnnnnnnnnnnnnnnnnnnnnnnnnnnnnnnnnnnnnnnnnnnnnnnnnnnnnnnnnnnnnnnnnnnnnnnnnnnnnnnnnnnnnnnnnnnnnnnnnnnnnnnnnnnnnnnnnnnnnnnnnnnnnnnnnnnnnnnnnnnnnnnnnnnnnnnnnnnnnnnnnnnnnnnnnnnnnnnnnnnnnnnnnnnnnnnnnnnnnnnnnnnnnnnnnnnnnnnnnnnnnnnnnnnnnnnnnnnnnnnnnnnnnnnnnnnnnnnnnnnnnnnnnnnnnnnnnnnnnnnnnnnnnnnnnnnnnnnnnnnnnnnnnnnnnnnnnnnnnnnnnnnnnnnnnnnnnnnnnnnnnnnnnnnnnnnnnnnnnnnnnnnnnnnnnnnnnnnnnnnnnnnnnnnnnnnnnnnnnnnnnnnnnnnnnnnnnnnnnnnnnnnnnnnnnnnnnnnnnnnnnnnnnnnnnnnnnnnnnnnnnnnnnnnnnnnnnnnnnnnnnnnnnnnnnnnnnnnnnnnnnnnnnnnnnnnnnnnnnnnnnnnnnnnnnnnnnnnnnnnnnnnnnnnnnnnnnnnnnnnnnnnnnnnnnnnnnnnnnnnnnnnnnnnnnnnnnnnnnnnnnnnnnnnnnnnnnnnnnnnnnnnnnnnnnnnnnnnnnnnnnnnnnnnnnnnnnnnnnnnnnnnnnnnnnnnnnnnnnnnnnnnnnnnnnnnnnnnnnnnnnnnnnnnnnnnnnnnnnnnnnnnnnnnnnnnnnnnnnnnnnnnnnnnnnnnnnnnnnnnnnnnnnnnnnnnnnnnnnnnnnnnnnnnnnnnnnnnnnnnnnnnnnnnnnnnnnnnnnnnnnnnnnnnnnnnnnnnnnnnnnnnnnnnnnnnnnnnnnnnnnnnnnnnnnnnnnnnnnnnnnnnnnnnnnnnnnnnnnnnnnnnnnnnnnnnnnnnnnnnnnnnnnnnnnnnnnnnnnnnnnnnnnnnnnnnnnnnnnnnnnnnnnnnnnnnnnnnnnnnnnnnnnnnnnnnnnnnnnnnnnnnnnnnnnnnnnnnnnnnnnnnnnnnnnnnnnnnnnnnnnnnnnnnnnnnnnnnnnnnnnnnnnnnnnnnnnnnnnnnnnnnnnnnnnnnnnnnnnnnnnnnnnnnnnnnnnnnnnnnnnnnnnnnnnnnnnnnnnnnnnnnnnnnnnnnnnnnnnnnnnnnnnnnnnnnnnnnnnnnnnnnnnnnnnnnnnnnnnnnnnnnnnnnnnnnnnnnnnnnnnnnnnnnnnnnnnnnnnnnnnnnnnnnnnnnnnnnnnnnnnnnnnnnnnnnnnnnnnnnnnnnnnnnnnnnnnnnnnnnnnnnnnnnnnnnnnnnnnnnnnnnnnnnnnnnnnnnnnnnnnnnnnnnnnnnnnnnnnnnnnnnnnnnnnnnnnnnnnnnnnnnnnnnnnnnnnnnnnnnnnnnnnnnnnnnnnnnnnnnnnnnnnnnnnnnnnnnnnnnnnnnnnnnnnnnnnnnnnnnnnnnnnnnnnnnnnnnnnnnnnnnnnnnnnnnnnnnnnnnnnnnnnnnnnnnnnnnnnnnnnnnnnnnnnnnnnnnnnnnnnnnnnnnnnnnnnnnnnnnnnnnnnnnnnnnnnnnnnnnnnnnnnnnnnnnnnnnnnnnnnnnnnnnnnnnnnnnnnnnnnnnnnnnnnnnnnnnnnnnnnnnnnnnnnnnnnnnnnnnnnnnnnnnnnnnnnnnnnnnnnnnnnnnnnnnnnnnnnnnnnnnnnnnnnnnnnnnnnnnnnnnnnnnnnnnnnnnnnnnnnnnnnnnnnnnnnnnnnnnnnnnnnnnnnnnnnnnnnnnnnnnnnnnnnnnnnnnnnnnnnnnnnnnnnnnnnnnnnnnnnnnnnnnnnnnnnnnnnnnnnnnnnnnnnnnnnnnnnnnnnnnnnnnnnnnnnnnnnnnnnatgaaaaaaacaatatcattaaaattatacccatatatcatttccttttatttttaaagatttatcaaatcatataacatttagtaaaatttccactatctttgttctccaaaaccctaccactcaaatgtactattgagaacaaattggaattgctaatgttagtggcatatattttgtttcggagtatcaaaatatggaaataggttttcaatttaaattttgctaaattatcttcctctgacaatacacccacaaatttgctaaaatgttttagctgttaaatgaaaaaaaaaacttaattgtccgaattacagttatttgaattaatatttaaaaataaaaaggataatagatagttagatcttttatttcaaggacgtgcacatactgatctttacctaaaatattagattcttttttattaaacttaaagctactaaataaaatatttttgatatatttatttctgcatgtcttcctaatttttattttgattctgattattgattgatgtaggtatcaaattgtctatcgcgattaggccagtggccgacctctcctaatcccctttaaaatagtggtatcaaatcatgttatataaaagcatggattttactttgatagattattatattataacaactagtattttaaaagacctctctaagtgatttgtcaacacacgattcacggtgaaaaaaactttaaacaaggatcaaaattagactcaaactctggcaatggattcagataattgataaactaaatctggtaagtctaaaaggcaaaagttctagtctaattttctgcgctttctacgatccaattgacattaacatcggccaatataattaattacgtgggggtctaactgaaacaacgcctagtatagaagaagtttagaggtttacagagtcttacatagaccaagaagtcgaggacacaacacattattaacacaaaaccaagtatccacaacctcaagaatacagacctcacatcaaatcaaatatctctagtttgccaatgtaactaaaacagtaaaggaagatgaactaacagcaagttagatcttgcactatagtggtccgctggaaataatgtattcaaaaagttgacttttaattattgccaagcagaaaccaaaaacattgaaaacttcctgctgccttgtgtcattgttgtccaagttatttaacattaacttcctcccagatatgctgagatgggaaaaaaatgtatagcatctgtgagttctgaaaattaggacagtattatgcatacgacagaatcttttaaagcaaagcctaacataacaaatgagttaaaaccagcattctttggttgcaatttcttcctgcagttttatggcggaaattagggaacttttttgtttctgcaaggaactgaccaggacatgaaaaatttccagaacattcaagcagatgcagccaaaggcacggatctgtagcatgctctctttgcagcgcgaacaatatcttcaacctgtacatccacatataccaggaagcaatcaaatttaaatgaaggatagacatgtaccaaaaccttgaacaaattagcatctagtatcagcatacaaaactcatctcttacaaaaccattaagtcagggcatttcacccattcaaaatagaaatacatttctggatcaaataatgaaaacaaatcttccaaatcatgctgacaaaagtcacagaaaacaattaatatttaagaaccattacctgtgggacagccattctttccagatttgctgcataaggcatgggaacatcagccccggcaattctctcaaccggtgcatcaagataaccaaaactctcctcaatgacagatgtgctgtgcaagagaagtacacactcgtatgattgccaagagttaaccagtaagatacattcacacaaaaacacattaatgtaaagagataaaccagatttcagcgccaacgccatgctgaggaaacccttcttcaactgtcaccagcctgttggttttcctgacagaagtattgattgtggatcgatcaagcggccggattgaacgcaaattaatgacctatgtggataagaacatcacgcaccattatcataacccaaatgatgtttttgcagaaaaggggggaagttcattataaactaaagttttacctcagaactgattccttcctttgccagtgtctcagcagcctaaacaccaagagaagagatatttaagaatgttctctactttggtagtacagaaaggggtcagagatttcaattttttttaaacaaattataaaacaccatataacacatcaacccatccagaaaaaaagttataatcgattcttgtcttatcttattatttaatatttaaattaaatgcaagacaaacctatatctttcacatactttgcagcaaattgaacaaacaagacaagtgaacaacacataatacatattacatatttataatacaaaaggatctcacagtaaacaaaccttgagagcatagccaaccatttttgaataggctgtaatagtcacatcttttccttccctctcaatctgtttagtggtaaaatgaatgaagcaaacaagaagtcaataagaatgtattattgtgtagtaaatatggctccaaaaatcataagggctatttaatatacgacagataattaactacctttgcttttcctatgggaaggcaaaaactggaatcaagaacttcgtctgaaacagggaatgactcaccatatctagaggacataattcatcaaattaaatattttttgaaacaagaactgatgacaaaatctatgactactcattttcatgtacaaatcaagcagcacaagtgtcttttttggggcaggagaatcaagcagcacaacttacaacaattcattttcaaggaaaacaacaggatcagggtcccttatagcagctttaagcaaaccacgagcatcttcagatgaatatggtgacaagactttcaacccagggcatgaaccataccaagatgcataacactgcataaaggcaaagttgtggggcatacaaagacgaaacctgaattatttatcagttctcaaatggttaaataaagtttgtctttaaaagaaagcagctaggagaaccgtacttgagaatgctgagcaccaaccccagcagcagcaccattgggtcctctaaagacaataggtacagatattttcccagcagacatgtagtttgattttgcagcagagttaataatatgatctattgcctgcaacaaagcttaaaactgaacaattaatctgccattacacatgttcacaaaatattcttcacagtttattagtatttcaacattcaagctaccaaagctcaatattaagattgtaaacataaaggcttacttcatgcagaagaaagagatttcatcttccaacataattcatacttaagaataatacttgaacatagaagcaataggagttgacaagtaacaaaattccagcaaaaaggcctgcctggcgtctaacaaactagattgatttgtatggcatcaatgtgatgttcaaactaatagttaacaataaactgaatcccaaccacaaatccttagttttatatctttaataacagggtaatcaatcacagaaattcacagcattttgtttgttgcccccacaatgcacagagaatcacattggattttgatagagcaaacatcacaagcccaaaacgtgtcaaatcacgaccactattggggatttcgtcatgtgcctggctgatttacattgtcatatccaccatgcctccccctctagcttgagcttcatcattttttttctggccaaaggacccagcagcatgccatttactgcgatgcattgttttccatcacgcccccttcactctctagtttgaggttcaccattttccgttgctgtcattttccagcaacctgttggtgttctacatagcaactcccatcctgtcacctcagtgagcccttggagaccccctctgttttgtttagttgttttgtactttttctccttttgtgtggtgtagctagcacttcatagtccacatggcattattcctccaaaaccttagaggctcaaacttattaaggtttggcactgtactttttatatccttatgatcctttgttgttattaacttgttaattatgcctaacgtttgtaatttttgatgattgtatatctagactatatcactataacttttgattatcaatgacgaaatgtttttcactgagtaatttttatttttgagcatttatgtatcaactgtaaattaattatctcatttatcttgtatgtataatcttcagaatagttgctatcgtgctaaaacatttctggggttggccacacacatctatatccttgattgataactgtgattatcaacacagcctcacagggaagtcaacatttttccttgtggagtgaatcatcatgtgttgaaaacctcataaccctggtattcttatcacacagaatacaaaactcatacaatgccatctaatatcttcatgggcagcaagctttacataacattgtacatatacataaattaagtggcactgctgtaaaaaatatatcacttaagttcacactcaatttaagaaagaaaggatgcaatcaagataaactccaacctgcatggagaagttaaaagtcataaactccacaacaggccttagaccatagtaagcagcgccaactccaatcccagcaaacccagcctgtattatatttcacaaaaaaaataagtcaatccaacagctgcatccaactataaataaatcctgttcttattttcctatcaattttaaagtgagaagctgaaaaaaagtaaattttggcgttcaataagcaatctattatggaaagttagaagcagctgctaagcatgaagaacaacacagttcgaaggaatgcatcccaaagccatcaccattaataaatcaagtgaagagatgcaaataaagtatgaagtaagaaaagcgacctcagtgattggagtatcaagaaccctctcggggccatacttttggagcagccccttggatatctagaatgaaagaaggaagaaagttaagttaatgttcttaaaaggagaggttggcaagacaactaaactaaccaaccaaccttgtatgcaccctgatattccccaacctcttcacccatcaagaacactttaggatcagctgacatttcctcgtcgagtgcggagttgagagcctccctgacagtaatctgcatcgaaacaacaatggcgagtttgatatttgatagtaagagattaagagattagagatgagaacaataatgcatacctctttagatgcagaagagaagtgtctgattgcggagaaagcagggcgaatactctgcaaataaaataaatcatatgaaatgtaattggaataggaatcagacttcagacacagatagtaccttgtgccttataacacccaacatcttgctttcttccttgatcttcaatcaagcaaaccaaaactagttcagtcacaaaacccgtagtaatccatcaaaaaatttcttctttctcaataataatattcgacaatgaaatcaaccaaaccaaatcaagcaacctttattctttttctttttttattattcatatatctaacaagttaaggacatgtgtcagcaaatgaagataggtcaattcagaaattttcctaggtcaattaagtaaaaattaaagtttgacaaaagggtaaagactaaagcggttccttgggagattcggttcgtttagcatccaattatccaaacaacttcaacataatttcttactattatttatataatagaatcttacgctatattttttttcataaaaataatcttaccttgtttatgatgatgttaagcgcgtgtatacaatatataaggaaataattttaattttttgtagagtattaaataaaaaaaaaacgaagaatagaatggtgtcaccttagaagtttttttatgagataaaagaggatatataaaaaaaagtcagaagatagaaatgggtaccaattaaaagaattatcctcaaaatagtcaaattaatataaaaaatattaacaatatggattaaaataaaaaataaaacgaagaatagagtggtgacacgaatttccatattaacgtgaagttaacatgacaaactgaatcagcaagcaaaggtgagtgagtgcgaagtgcgcgacaaggcgtaatttggcgcatttagatgaaactcacaacttcactaacttggcactattttttggtaaacaaaaacaagaatcgttaaagcagcatttctgcgccaactctgtctcgttagtttccatcgccaatacgacaccgctaatgcaagtcctcgtcgtcgtttaacgctcacgttttctgttccctgagaaggtaaaaagcgttcaaacgcagcatctcaaacactacgagatctcaaacacgcgattccgaagattttctgcgatcaatggagttcgacccgatcccaatcggttcgtgctccaaagaacaccagacgatctataaggagtggttcaattgcgctgattcaggtacagcacagcatacttcatctttcagtaattttttttttgttccaattttatattgtctgttcctgtttatatccaaaaatttcaccgtgcacttcgttttccagatagcgatggccgcattacagggagtgatgccaccaagtttttcgccatgtccaatttgtcccgcgaagatcttaagcaggttttctgttttcccgtttttttttttccattttctttctttattgtcgttcttttgtattgtaccgaatgaatgcagataggagttggaggtaatcggaatcatgtgccaaaattctaagatatgattgcttggttaggggatgaagttaaaagtgataaaagttgggcattattaacatggcctaccttttccttcttattggttttcctcgttagtgaggtgaaccactgattgcctgaatcaattgacatatggttgtttccaacttaattagtgttctcaaatttgagtcctgactattcaattgcattaaatattcatgttaaattttctgccgatagtaattctactagctcaatcaggactaccttacatgaaggatgtctgttgtctctgccaaaatatataaataaataaataaagtgaggtgaaattgaagtgtacatgcaattgtagaaaagagataacactgggattctatggttttacaaattggccaattttggtttaatgttcatttattatctcattcatttcaaacaatataaaacaaaatgttgtttactttcattttttattggtttccttctctgcctttgctatcaagcatgcactagtgaactgtgaacttcctttatccttcctatcttaaatccttcttcaatttcactttgccgagtcaaacttagttgctggtcttgaatcgggttgtcctttgatttgggtaatgcctcttatatatccagtagctacattggttttgatttttgcaattcagattcaaatctgatgcattgttggtatagagaattttatcctgttattgaagcatattgtcaaatattgtcaactatttttgcaaatgaaatattttttaattacacttatgatgtgacactttatggtttcctgatattgtttattttatactgataatggactaattttgaactcttacaatatatctcatgtagaagttgcctttggtactgtattatctataacaactgaaatggtttgggcatttaatggttgtgtacttgtgttgttaatataatttgttgtccttgcttataagtatctctgttggcttctttctttctgctaactaaagtgtttctttgtttgcttctgttaccaaaataaggtgtgggctattgcagattcaaagcgacaaggatatcttggtttcactgaatttatcattgctatgcaggtaaaaatatgttatgctttttttgaacttcaatgctgataaatttccaaaatcttacacatctgaagtgtagctagtttctttggctcaatctgggcactcaataacacccgatctgctgactagtgatggtaagtaatgtatgtttaggtttgtcttctattactttgtttgaataacttcttataattgtagcacattcttgttgttgtgcctgcttacatattttgatttgattgtgaatgtcttcttataaatttaatctaatggaagcttaacttttatttcagttgattttacaaatgtgaaacctccctcaatggagggtttggacgtattactagctgtaagtatttctttttaaggtctattttttttacagtgttaacatttttatgcttatttagtgaaagttctgaccatttgacgttatttacccagaagaaaaagcataaacaaaaagaggttgatgcaaatggtaatatatttatcgttttactaaatatggtcattcatattgattttattttatttgttcttttcttctaaaaatctaagttcagcagttagcaataatgcaggtagctctcaattgcagccatcgacgtcaagtaattggttttcttcaaagtcaacaaaaaaggcaagcattctgttactgttactttgattgatttcgtgtgcattatccttaccatccagtccactagaaaactgttagaccatctatacagcaggtgtatagggctaaaacgcatgggaggtttaaaaagcaattgtaaatgtaactgacagctgtcaattacagtggagttagttaactgcatatatatagcagttaagtaagagggaaggggattaggatgtatttggggaaattggattgggaggttaggcccaaatccttggtgtaattccattctgaatgaaataacagagaaccattagatttctctatcactggttttgggggggagtattgttagaccatctatacagcaggtgtatagggctaaaacgcatgggaggtttaaaaagcaattgtaaaatgtaactgacagctgtcaattacagtggagttagttaactgcatatatatagcagttaagtaagagggaaggggattaggatgtatttggggaaattggattgggaggttaggcccaaatccttggtgtaattccattctgaatgaaataacagagaaccattagatttctctatcaaaaacttatggtttcgtttagtgttttcttttgatcttgcagagtatatttgagagacttctggttatgttgttctctgtcttttataagatgatgaagcaaatgtgtttaggggcctgaaaccaaccttattatttaatttcaatgcgtgtgtaactgatattattagccaataatactaatgtgcctgatactacacatgtgaatattgttgtgtcaatctagaattgttattatctaatttcttctttttgacttaacaaaatgcgcattttgtctcgtgtcaatctaaatatctaattttgtctctaatgttatatgaatcaagttaatgttaccctaaaggtcatcctatagatatgttctctaggaccttttatctgtatttgttacctctttattattgccagttctttaaaattgtcaaatattatttttgttatgtgtttttacttgtatttgtggtacatatgttcataggtgcctctttcctctgtgacatcaataattgacggcttgaagagactctacattcagaagttgaagccattagaagttacttaccgttttaatgattttgtatccccattactggtcagtaagttattttgtttagaaatgactagctactccagatttactgccacctttctttgtgcactcatgttgttgctatgttttaaatatctacaaagatatacaattagttttgttattgattgtaattctttacatattgtagacaaacagtgactttgatgccaaaccaatggttatgcttttgggtcagtactcaactggtaaaacaacatttatcaaacatctgcttaaaagtagttatccaggcacgtgattctcctttcactatatccatatatgtatttctcacattgcttatatctgttttatgaagaaataattttaaatacatttatttattttatttaatattctttgtaaaattttaggatgattaataggatgatataacatttttttaaaataatgttattaatctttgtcttgtttttcccataaatgttggtaggagcacatattgggcctgaaccaacaactgataggtttgttgttgtcatggtatgtgtaagccaaatcaatttatctcccacgactctctattaccttcaatgttttcttagttttaaacgaataaatcaattagacttctaattgctggcaagactaacatcttggtggaagctatgaagcatcaacactgctatttcttgcagtgtcggagtgtcagtcatacttccaatttccaacactagcacttctttaacatttgtatgacatgtgttggacgctactaaactggtgtttaattaattttttgttgatggcttggacatgggttacacatggtttggtcattcaactctgtcaactgacacctaaatatgggttgagacttcaaaagacaagactattttataaatttgaaaaaatgttttaactttcagaaatcaacttaaaatataaagaataatataaactatttaaaagatacaaaatgctaaagaaacttctttagggaaaatgtaaaatgatgcttcttaatattttttttttttgtgtggggctcattatagtagggcataagtaaagcttaacaagttattttgagagggtgaatataaattcagattctcaatttagatattttgtgatgttaatcttttttaattccatttgacatgcaaacgctcatgctcacacatgtttgggacattgccctgtgtttgtgtgtctattcttcataacatgaaaattctaaaacttggcaatggaactcagtagttcgtaccatagcattagtgccaagagttgatggtttaaattattttcttaataatcctttaatctagtagtcatcttgaaaatgagttattgcattagttttatattttaactagcaaaggatgctgatgtacagtctggatctgatgagagaagcgttcccggaaatactgttgctgtccaagcagacatgccatttagtggtcttacaacttttggcacagcatttttgtcaaaatttgtgtgttcacaaatgcctcatcctgtaagttgatctagatctgttcaaaaagtttacgagatttccctttatagcatttagaattgactctttcaattgtccaaagctactggaacacatcacatttgttgacactcctggagttctatctggagaaaagcaacgtacacaacgagcatatgattttacgggtgtaacatcttggtttgctgctaagtgtgatttgatactccttctgtttgatcctcacaaactggacatcagtgatgagttcaatcgtgtgatatcatccttacgggggcatgatgacaaaatccgagtagttttgaacaaggcagaccaagttgatactcaacaagtaagagcttgtgtagacaaacttctgtttgtttatcttttgaatctttcacaacctagtccggtgaaatcttaacctatattgggctctatgttgcagttgatgagggtttatggagccttaatgtggtcacttgggaaggtgctgaagacacctgaagtaatgcgagtgtatattgggtatgtctccactcaatgttcaagtgttgtctttgttatggagggtgggggagagactactttgtttctccactctcagtggaagatctcttccacgccgccttccccatttgctatgcaattagacataatataactgtatatttatttccttgtttatgagattgccatgtgctcatttgctcataattaaccttctttatggaagctccttcaatgacaaacctgtaaatgatgctgccactggtccacttgggaaggaactctttgaaaaggaacaggatgatcttctctcggatctgaaagatgtaccaaaagcagcttgtgatcgaagagtgagttatttatttaactaaatttattttctttatcataagaatagttttccactaaaatgaggtttactttgggtgtgtttggttgtgtttttggtttagtttttaaaaactattttataaaacatttttcaaaaactaattttcagaaagagtggggaaaatgtgaaagtgcaagaaagaacattagtaatacaaactgaaagtaaaaaattggaacaacttaaagatggacctaaaaaagagttattagttttgaaaagagtttaaaaaactacccttatatacaatagttttttagtgtcattagattgttttttagtgaaactacaagaaagtcagcgtatcgattagattgttttttcttttgtgaaattaaaaattacgaaaactaatgttatcagctcttttagtgtcatccgcactccacacacaagtttgatacaatagtctcctttcctatggtataaattctacaggtgttttttgtaggtgactatctcgaatcttcaatttcagtgtccagtttatatttaaattgttaaagttacttttttgcataattaatttatcatttgtatatattgactgttatagatcaatgagtttgtaaaacgggcccgagcagccaagatacatgcttacattatcagtcatcttaaaaaggagatgcctgctatgatgggcaaagctaaagctcaacaaaagctcatcgataatttggcagctgaatttggaaaggtatgaatctgtgtacatccgttttgcttatctgcttgtctctgacaacaattaaaatgtatacacatgactgacaactttgaaacaggtacaaagggagttccatttacctcctggcgattttccaaatgtagagtttttcagagagagattgagtggttacaatattgataagtttgaaaaattgaaaccaaaaatgatacaagcagttgatgacatgttagcttacgacattccaaatctcttgaagaattttaggaatccctatgattaaatttctgagcaatggagtcagtgctataattagattagttagagtgacatttgtagcatacaatttttacggggtctttatgcaatgcatgtgcgtcatgagatctttatgtaccatgcgtcgccgttcttttctagtaggaagttttataattcaatatatgtttttgtatttatgaatattttgtcatctacaatcaagtgtcaagacagaaaataaagacaaaacacaattacttgtttgcatcaagcccgttgtgtttagtgtagttaaatttaatgattaacaggttggtctagtcgtcaaggaaatgtattgctttggtaagtttgaatcttggattagtacctaatttttctaattaaacctgatatgtgagaggacctccgttagtcggttcactaatttgaaatgatgaccttgggatatttttgtcacataattgaaatattgaaataatccgtggctgcatatatactcattttatgtaagtaccgagtggccaaatgacacaactacctacaagtcgaatttggttaaaatagactttttgggttttgttaaaaccatggatgatgtcgagtttcatgtattcttattcccttctaactcacccgagctgctgcaagaataatgtaggaatagagtggacccataatcatgagagttcggatcaaacaatttcatttaaaccattactaaatactattacccagtgtttttcaactaataagcattattttcgaaaaatgctggcaaacattctttgtttgtatgaaacttatcatacatggagtaaaacttagtatattctaataaatttcaactaaaacgggtatgaaagtttattagtggccattttttttttgtcataactgaaatatataaaggaaataactagtaagcatctatttagacacaagttagaagtgtttttaaaaaattttctattgaaaatatatatttttttcaataaataagttctcaaaaacacttataacattatatccaaataacctctaacataatttttaataattttttaaaactgtatgttattatctcatgagatttgactcaatttatagaaaataacaaaattatgggtgagtcattaatagttggtgagacacattattatcttcaatcaacaaacttaaacaaattggagaaccttggttgcaccattgtgcatgaagtggatgttcctaccatgaacaaacacccgctgctccgaaggaaatattttgatgacactgtcttcaattttccacatgctggttttgtttatagtgaacatgatccgtgccagattgagtaagtttataggaagaacaatactactacaccaaatatggaaaacataaaatgttttatatacacacgttctgaacgtatttctatttaacttaggcttcagaagcacgtggtgtcggggtttttgaagagtgcaaggaagatagatggtaagccaagatggagaaattcacatgacacccaagaatgctcacccttttaataactgagaagtagtgacactgacagaggaagcagagttattcttggttgagaaagtgccattttttagatgggactatccaggttacgtaaataagagagtatccggacccaaatgcaacaaagcttttcgtgttggtgattgtagcacctttaaattttccaaggtgcgtgacatggaatccatgatttcggaggtgccaacatgttcaatttgaaggacaatggagtgctgcagcttgttagtcgtcgtcttcttttaggaaaaacattttcggctctagtgaaagccatgcccatggcccatggtatgctatgttctctaattcactacaaacactctattctattgttttgaacttttgctttctatcgttgttggataaaatgtagctattactattagtcatgatataattcggtttggttgtgtaaatttaggattttattaaaatatttacctgccattacgattacgatgcatggtagagaaaagggtaagcagagtaattgtttaacatagatgatattcataacaagtgccgttggttaaaaaataaataatccttctaaaacaaataatcttaaataattctatatttttataaataaattttcattcctaattttgtcaatctctttagagaattttcgttaagtatgttatatgtattatttctttttaaaatagtgatcattataaaaaaaattattcaatcgtttttttttttaaatttgattgtcctcccatgaaaatttgttaatcaatttttttatcccatcttgtttagaatgttattgagattttttatttattcattttcaataaatcttaaacaataataataaatttaatggctatgcagcgagagatatgaataggtgttaattaaagaaaaatgtgctgttaacaatcctcccagactccagttaaaatttggagatgcattgcttaatagaggcgacgtcgttataatgaatagataacctcaccaatttatgtttttctctctccaccgcgagcacagactttgctgttctcttttctctgtttttgcataaacactctgttctgttctgttattcgacaacttttcttcttcatcgtcctcaacgatgttggttcatagggttttgtcccgtgtttccaccaccattttccgaacctctctcctctctgcttcgcaaacaccccaacacttgtccaccctctccaatattaacttacattcccttcttccccattcacccaacaaggtgctcttccacactttcccaaaatcctttgatttcccctctttttttcgttttagggttttgccagggtttaaggaggttgctttttaatttgactgttttagccgtttcgctatttcattcgattggattctgttcattgatttttgaattcagctgtatttttgaataatatattaacgtttgaactaagttgcctagaattttcagtgatgattttttttttttaattaggggtcatgacagattgtgtatcagaaattcgtaatttatgcagtttggaataggttgcattatagagtgtcacccctaattgttgcttttgcacctcttttgatgctaatttatctgttttagctgttggttttgaattcaaatgttcagaaattttatttatgtcattttagggtttagaaaaacaaaatcaggatgaaatgtcttctgtcattttgctgctgttcacttgattgtccatttttgccagggttttatcaggtgtgttgtgttttattacattaaaagagaaaaaatgttataaaaagtgttttctcatgtgtggaaataagtatttaatgaaaaaagtggtcgatgaaatatgagtgtaacttttttttttcttgataaagaacattatgcctgagcttttatattactatgttatgtcctgtcttctaaattctatccatcttctcattcttgttcactgtcattttcttaaaatatttttcctaagaaataccggtgttttaaattccttgtctgtacgaaggaacaataggttccttaaaattttttgttcttctgtcatagtatatgatactatgaaatatgatttatatggtgattggtgactatcattagcctattttctaggattcaattatttttatctaatgaattttagtgatgcattttaaaattctcattaaggttccaaatatgctttctaatgttccaggtgattcctgttcaactcaatttgttgctgccgccaataaattcattattagctccaaaatttgggttttcttcatcagcttcaaccgaaaataatgacaaggaaaaaggaaataatgtgcataatggagattctacaaatgatgaccctgcaaaagcaaatgaagaggcaaagaataatgatcaggctaaacaagataaatctgcagataaaacagaggaatcaggttctatttcagattctcaatctccaactgtcaaaagaaggaggagaggttttaaacggactgcattttctgattcagattcagagagtgaaagtgacttatccagggatgatttaattaaacttgtggttgaaaaggaagaacttgtgacgttaaagcacaaggagattgaaaaaatgcaggataaagttctgcgtacttatgcagagatggagaatgtcatggaaaggactagacgtgaagcagataattcaaaaaaatttgctttacaggtctaactttgatcccttttgtcccaaacatttcctcttcaactgtgttctgagtggtttaaatatgctgtagaattttgcaaagagtttactggatgttgcggacaatttgggaagagcttcctcagttgcaaaggaaaaattttcaaaaattgatacgtctagtgactctgctgaagcggtgaaactcctgaaaacacttctgcaaggtgttgaaatgacagagaaacaattatcagaggtagaatgttatactttatgttttatctgtttaatttcaaaagtcatagctaatctattatcaatattttctttctactcatttttatattaagttttaatccccatttcttttcagctatctaagttcctcatttatatagttttgtttagtaatgatagtcgattgatggttaattgagtgaatgtgagggtacggtaaaagtgatttggagggactaggagtagaggctttattctcaagtttgaggacatggttgttcaggtggtgcgagattaggggggcttgtttttatttctgtgttaaatgatgtttgttttttttttaaaaaaaaaaacatcatgaacatgttggaaattattttcttattccaatttctcataactattttatgaattgttattttaaaaaaagaataattattctgtgctgaatgcacttgatttacagtggcttgatagtaaattggatatttagtttacctgttgaattttgatgaattgatgggtgtgttgggaactggggaatttggggaaggactttagttccttcatgtttcaaactcaacttataatcatactacaaaagttttttccagttatattttactatgagaagtacactctttctaacacactgtcttattggcttaaatttgtcggaaatcacaaaaatgtttgggttccactccatatttaatgaatctcattcatcattttgtagttttcaataaatttttatcaataagagtgtgagtgtggtgccactcctcattttactatacaatatattattgtatgcttgaaataatatgcttccttagacagtaaagtgcttcaggctactgtaaaaataattgcttccgcttacaggtacttaaaaagtttggtgtagaaaagtttgatcctacaaacgagccctttgatccacacaggcataatgccatcttccaaatccccgatggttctaagcctccaggaactgttgcagctgttctgaaggtaatatacagtggaaggactgtgattcaatttttccaattttaaaatttgttttgacactcaaaactcttgatgtgctctctttgtctatggtgcatgcttacttgaaaattggtggcatatctatatcatattcatattcaacactgttacttttatggtaatattgaattcgtatttttgttgttactatatcttttcttctgagattcaaatccaagtcatgctctcaacttctcacccttcaccttccagcaaagcacttctcactcttgctatcttaccatcctcagaatcatcacaaagaataacaactgaataaatttaatttagttacggatataaaaatattaatatatattaccttaatgtattttaacttttttttataaaataatcctatttgcttactgggagagctagcaacacttttttaacatgctttctattattcgatttgtttcatggtgtcattaaaataactctggtccctactttatttagtgggactcgagtgcaactcatctaataataaaaggtgttttgcaaacatttctcttgcatatcatattgaatcgtgttggacatgcagcacagtttggttaattatctatatattttgcagtgtgtccagttctggttgatctttgtcagtgtttatgacaaagcttttttgtttttttaacccaatcatcggatacttttcctgaaggaatgtggtcttattcttagtgttgttgggcagattatttaggagattgaaaacatgaataaaaggctatcttatggttgtgtctgcaggcaggatatatgcttcatgatcgtgttattcggccagcggaagttggtgtaacccacgcaatcgaggatgaagagaataatggaaaagatagctgagtggggcactttcaaaatgtgtgaaatggaacttttgaagtaagttattgcttacaaatatttgtcgtcaaaaggggtatgagaaaatgaatggtacaaccgtacaatatattatctgacatttttgaacctttcattatttgtttaaattttattttaatactaatatagaattttttttatttggtcaggttagcatgaaattttttccgtgagactattattttatattagagtaaaatatgtttttcgttgacgtaacattatcaaagtttgtttttgttcctttaaaatttttgtccgttttttggttcttgcaaaattaaaatgtgacttttcttctagagctaccttttggcgaattccaatccgtgtggtattttatttaatttaaattttaaaatacaattttaggggatttttaaacccactagaaattgcagaaaaaataaaaaaataaaaatttgtgactattaaaaattgtcataaattataaaaaaaaattgtaagaataagctataacctctgcaccttaaaccaccatcaccgccgcacctcgaactaaaacaaccaccaaatccctatttcccaaatcgaaacttgaatagcagagatgagagatgctctgagccgtcgcaccactgcccatccagtgaaggttggttggattgcgaagtgagcatgacggagctctgacggggaacggaaattccgactcttcaaagaaatggggagaagagcacgagggagggaaggggagatttgggattgaatcacatatggatttaaacatatgtcaacgtctgattggttactaggttttatgtgtttagtcatcaacacgtttatttgaacataattaaatttagtttcgattcaacatatcatatatttaatttgcgaggataaaaaataaattttttatacaaaaataaataaattttaataattttataggaatagaaaacatattgaacatattttagcctttagaataacaaccaacaataaccatacaaactatgtgacgctcgacgaccaaattttttcatgtcctaattgaaatgtttagtgtatgactattattccaattcacatgtttgacatctaaatgggctagtccatttagcccgtcaaaaaaggtggatcggactgaaaattttagtccattttaaaaatgggttggaccaacccgactcacaaaaaaggctggccaaatgtgggtcacaaaaaatggactagaggcggtcaatccgatgggtcagtccattttagactttttcggcttttttaaaaaaaaatttaattttttggtgggctggcccatttgtttgccaatccacgttgaagtagactggattaggattttcaactcactttctgaaagtggatcagccagtcccatttttttggtagattgtgtgtgacccattttgagaaagttgatccattttgccatctaactaataagtagaaatgaatctcaaaattcacaattttcatgtgaaagtcttaaacacaggattaaatttcaaaaaatttataatattaataaacaattcataatctatttacttgataatcaaagaagatgctttttaaacatgctaaataattggtatatatatatatatatattataatatttatatattaaattcattgctatattaattacacttgccgaaacacgtccaagccaaaaaaaattattttgtaacatttcattatcaaacatagcaacggcagggtagggatgaatattggttcctcaatttcccactccaactctcccaacatatctcctacttgtccttgatattctcacaggttgaaattattatcccatttttgtatctgttgatatcgggtattcccgtgttcgatttaaatttgttaaataagtttttttaacaaattatattaaaaatctgattttagaaaaaataaattaattatcatacatttatttttaactacttatatatatcaataaattcattaaaaggacatttgtctacaaaaaataaactgactaacaggtatgaatggatataattatgaggcaggtaatgacatcttcaccctgccctgacctcgattaaaaaagtcgaataattcttgaacctgaatccatattcgatcaagttagatatttcctttcaaagttggaacaggtacccacgactatgaatttcattgccatgcctattcattatcttagaattattaataacatagtactaaattgagaaaagaatcaaatcgaacaaaatttaaaaaataaaaaaccaaattaaatctaaatgataactttgttaacttttataagattaccttaaaatacataaaaaaaaattattttgtattatcatttcattaacattaaactactatctaattgaggttagagcttcaacaatttttctaagcaactgagagtaatatttttcttcaatattggtatagagtattttgtattatcattccattaccattaaatttcatcattttttttaatcatgatattgacataaactatttattgatgattatctccaacaaaaaaattaacttatcacttttaataagtttctcttctcccaatcataaaactccaacttgagactttacatacacttcatgtctacttaaacctttatgacatattcctctttttatctccttttatttattttttttatagttatttgttattaaccagataaaattgggtattataaaaaacacgtggaaacctatatgtctcaataaacaaaatgttgtacattgagaagaaaagaaaatggtaaacacgtacgtacctaaaaaacaaatagcagaaaacttgaatttgatttttattaattactctccaacaaagaaggtgctaaaccagtaagacattttagattgaaggtgcaactatgccttaataagtctctctgtggcgaggggtgcaatatagctaagcaaatttgtttggcggtcaagagcagaaattgcagggttaacaatatctgcagaacgcaagtcttcctcacatgacaaaggtccatcaccatcagttttggccaaatggttaacaattcgaggatcgtctttcaacttacccaatgaattcctaaacgaatcaaccgtacttccatagtaaattacacatcttgccatggcgggaacatcttttgtcttcgccaatcccgtaagatacttttcaccttatattccctttttccagcccaactccatgattgcctctgcaagttcaaaaaaatttgttgcactcaggactttaggatctgctcttagaagattcatgcatgcaatcttgttcggttggttttcattgcaaatttgggcaattaggacgtaaccattacgaagatctctagcatttgttagcgaatgagactgagcaatgaggaagaagcaaagggtgagcaacagggaacacagttctaatgaattgaattcctcatgacaaaggtccatcaccatcagttttggccaaagggttttcattagcactgtgttccctgttgctcaccctttgcttcttcctcattgctcagtctccttcgctaacaaatgttagagatcttcgtaagggttacgtcctaattgcccaaatttgcaatgaaaaccaaccgaacaagattgcatgcacgaatcttctaagagcagatcctaaagtcctgagtgcaacaaatttttttgaacttgcagaggcaatcttggagttgggctggaaaaagggaatataaggtgaaaagtatcttacgggattggcgaagacaaaagatgttccccccatttatatatttaatgcatttattacttagaatccaaatatttattgtgttatgtaagcaattaaaaaatatttagatagatgtttgactattaaaaaaaagagagagagaatatatttgacatcttgagcttatctttttacttaaaaagagagagaaaccttttaagtacacattattattcgaataattgataatatataatatttatattaaaatttattattatattaattacacttacataaacaagtcaatgtcattaaattttattttgtgacatatttaattatcaaacatgtcaatgggacgagacaaaggagggatgaatattatctcctcagtccttgaccccctcactcaccaacatatcaatatatatgttctcgatacttgacatgttaaaatttgtttttccattcccatactggtttggtattgagtatccctattcgtgtcccatctaagattcaattttgtaaaataaatttattttaaaaacattatattaaaatcagattttggaagagaaaaaaattgattgttacacatttatttttaactactcatatatcaataaattcattacatgacatttgtctacaaatccaaatattatatatatctaatgcatttattacttaaaatccaaatatttattgtgttatcatttgtcaaattaaaattgttgacagaaaatgatcttacgttttatattatatatatccaatgcatttattacttaaaatccaaatatttattgtgttatcatttaagcaattaaaatgagatttannnnnnnnnnnnnnnnnnnnnnnnnnnnnnnnnnnnnnnnnnnnnnnnnnnnnnnnnnnnnnnnnnnnnnnnnnnnnnnnnnnnnnnnnnnnnnnnnnnnnnnnnnnnnnnnnnnnnnnnnnnnnnnnnnnnnnnnnnnnnnnnnnnnnnnnnnnnnnnnnnnnnnnnnnnnnnnnnnnnnnnnnnnnnnnnnnnnnnnnnnnnnnnnnnnnnnnnnnnnnnnnnnnnnnnnnnnnnnnnnnnnnnnnnnnnnnnnnnnnnnnnnnnnnnnnnnnnnnnnnnnnnnnnnnnnnnnnnnnnnnnnnnnnnnnnnnnnnnnnnnnnnnnnnnnnnnnnnnnnnnnnnnnnnnnnnnnnnnnnnnnnnnnnnnnnnnnnnnnnnnnnnnnnnnnnnnnnnnnnnnnnnnnnnnnnnnnnnnnnnnnnnnnnnnnnnnnnnnnnnnnnnnnnnnnnnnnnnnnnnnnnnnnnnnnnnnnnnnnnnnnnnnnnnnnnnnnnnnnnnnnnnnnnnnnnnnnnnnnnnnnnnnnnnnnnnnnnnnnnnnnnnnnnnnnnnnnnnnnnnnnnnnnnnnnnnnnnnnnnnnnnnnnnnnnnnnnnnnnnnnnnnnnnnnnnnnnnnnnnnnnnnnnnnnnnnnnnnnnnnnnnnnnnnntaaaaaaagagagaatatatttgactttttgagcttatcttttttacttaaaatataatattcaggaaaatattcttactttactcatcaacaagatccttgaataagaaatatcttgttttataatattcaaggacatattcttaaaaaaaattgaatgcatattttctaatccttgaaataaggaaatattttcgagtcattaaattatattaatatctttataatattatactttaaagctacaaataaaatatcccaagacattcgtatttattattttggaatgcaaatatttaatgtgttttcctatagtttaacccttttttttagtttaactttttctacttacaaatgagaaactgagtgaaagaattttcttaataatacataattgtgtatgatcaatcgctgatttttatcataattattcaaaaattatatttaaaataattttaattaattgataatggactaagattattttaattgttgaaaaaatatttttggagtatcataaaaagttttatttaaaataagtcacaatttgcttatttttttctctctagggttcgcatctatttacctgacacaactgatgatccgattcattttattttatattttctggtagcaaactatcatcacaactttaccaacttcttacaacatataattatattttgttataattctttgtatgataagattatggaacctgcaataacactaatatgttatcatcttaattgccaatactcaaaatctatagtaattagaaaatctataatacctctttaaattttttaatatacataattaaggttgaaataaaatctgaataaaataatataaattaagaaagcaatgaaacaagtgaataactatgtctttgttagaggatatccttaaccaagagaaaaaccacatcaagattactatgtgaatgttattagtttgttcttttttctttactctacgcgttaaaaaatcatatacttattcaaatatttaataatcataacctaattaaattataaattaagatgttaaagttaaaatcatatatatagtaaaatcattatcaataagcttaatattatatatttaatgcattttattacttagaatccaaatatttattgtgttatcatgtaagcaattaaaatgagatttagatagatgtttgactattaaaaaaaagagagagaatatattttacttgttgcttatctttttacttaaaaagagagagaaatcttttaagtacacgttatcctctgaataattgttaatatataatatttatatattaaaatttattactatattaattacacttgcataaacaagtcaatgccattaaattttattttgtgacatatttaattattagacatgacaatgggatgggacgaggcaaaggagggatgagtattatctcctcagtcctcgactccgactcaccaacatatcaatgtacttgcatgctctcatactcgacatgttaaaatttgttttcccattcctgtagtcatttggtattgagtatccgtgttcttgtcccgtctttggttcagatttataaaataagtttatttaaaagaaaacattatattaaaataagattttggaagaaaaaaaattgattattacacatttatttttaactacttatatatcaacaaattcattgcatgacatttgtctacaaaaaataaattgattggcacatatgaatacgggtacgagacgggtagtgacatcgctatccctgattccaacctcaaccctaattaaaaaagttggataatcctcgaactcgtacttgatcaactcatgtattctctatcaaagtcaagacaagtacccatgggtacggatttcattgtcatgtctgttcattatcttagaattattaacaaaatagttctgaattgaggaaataatcaaatcgaacaaaatttaaaagataaaaaactaaattaaatctaaatgataagtttgttaatttttataaagttatcttaaaaaatattttgaaaaaactattttgtattatcatttcattaccattaaactactatctaattgagtttagagcttcaacaatttttgtagcagctgcagcaagtaatattttttagactttgtattcaaatgctttcaataaattgttatcgttagtaccttatatgataaagtcaaacaagaaataatacatattctcttactctgtgttttaaatggcaagagacaatttgtaaaatactaatgctaaggtaaagtagtaggacgagtgatttatggtggatcatatattttgtttataatatggacagttaaacttcctagttgtatgagatgttataatgcaccagatcctctttttttgaacaagtattttctttttttgaacaagctaacattctagaaacttggttgacaccaaaaattcagatcctagcctctacatttttgaggagaggagtgcatcataggtttgtagacatgagatcaatctaatgatcattatttgtggtgcaccataaaccacctaggagaatagaggacaaatcagaaaaaaaaaaaaaagaagaaaaacttagtcacggatcctaaccaacatcaaattttacatctctaattgatgaaccaatatgttaattaattgaaggaagctggatgaaaaaattcagcgttttccattgccattagtagaatgtatatgactcacgagagcagaaaccggcaggtcaacaaactcaaaacaaggggcatggagccaacaattggaaatgtatgcacttctagcaaaattgttcatgcaggattttttttttctcacaagtagaatatacactgcgttgttaaaaatatacatagacataggtatctaccttatcgttgtcaaaagtgggacatcattagccaaagttttaggaattatactagtcagtaacccgtgcacatatgcacgggttgctccgctatattttttaattaatttaatttttatatataataactaaaatatttatatttatgatattattgataaaataatttaaattaattaattttgatagtcttataacaaagaatcgaactattattttctaataaatatattaactaattgttattatgtttgttattttaataattcaattaaaaaaagtgtttaaaattttcaaatcttgattaaatttaaataataaaacaaaaaatatttttatttattaaaatgtcaacactttatttaacaaaacttgattaaatttaagtaataaaactataaaaaaaataattcacattctagaagatgattttatgctaacttgttcacaaattatcttagtcatctagcatagtctctttaacaatgaaataatgaataataaacaataaaactataatgaatgaagtaactcactctgactatattctttgttatctttatcaaaattaaaaataattttatttatgatattattgataaagtaatttaatttaattaactgtgtttgtcttataacaaagagttaaacaattattttctaattaatatattaactaaatgttattatattggttaccgtaagaattgaattaaataaaaataaattaataattctaaaatcttgaataaatataaatagtaaaactttaaatattttttctcgtaactattcacccatgatgatctagaataatattatttctcgtaaatgattaacacaatttctatcataaaaaatgaaattaaaattaaattacattatggtatagtgagtaaataatttaaaaaaaaattgtaacaaaaatattttttataaattaatttttatttttatctctattatgatatgcaataatatttttattcataatattattaataaagtaatttaaattaattatatttggttatcttataacaaagaatcaaactattattttctaataaatatattaactaaatattattatgttggttatcgtatcataagaattaaataaaaaatattttaaaaattccaaatatttcatatatttaaataataaagctataaatatttttatttctttaaaatttcaacactttatttaccaaatcttgattaaatttaagtaataaaacaataattaaaactaattcacattttggaagatggttttatgttaactattttacaaattatcttaattatctggcatagtctctttaaaaatgaaaccatgaataataaacaataaaattataatgaatgaagtaacccgctcgggttattttcttattggtctgtaagggtttaaaaattaggatcctaaatacaattaaatggaaatatattacaaattatttattcaatgcatttgatgtgattaaaatactaattattataatttatttatttttcttattaaactgaggtactgagggagaatggcatgaaggagacgttgaaaatcgatgaacaaggatggcaaacgggctggtccgtaaaaaaagtggcgggctggcccggcccacaaaaaatgcggggctgactagcccgggctgcttttgcaaagtgggctgaaaatgctagcccgtcccgctttaatgcgagccagtgggctagcaggctagcccgcctaaaaaattttaaaaaaataaaaaagttaactttaaaaagaaatacaaaaaaaattattaaaaaatacaaatatgataattaaaaaaaaacacaaagttaaataaaagtaaataatttaaaattaatgttaaataaatgatgtcatgtgataattcacaaaattacgccatttgcaaatgaaatttacggatgtaaactgtccaaagtgtaatatgttagtaataaaagattatttgaaagtatcattatcataaatattttaatattaaaacttaaaagttaattatgagagtgcaaaagagtataaattaaaagaatatacctatttcaaaatatgttaaatatacttatttaattttaatatttaatattttaaataatattggcgtagcggactggctcgccccgcctcgcgtttgacccgtaattttgtgggctgggctgacccgtcccgcttttgatttgtggcgagcatctaaaaatggttgtgaaattgacacctgaggttttgaatttcaaatgaggtgaaggagtggtttggagctttcattttgaatttgaatttcaaaaattgaaacaatttttgagttgaggaagaaaaagcggaagtatgaaggtgaagaagaaaagtgaaggtcacgtgaagatgaggaattgagtagttagtgaaagtttttccaaagctgagaaggcataataacgtgacacctgacttccaaagctgagaatgcaaacaaaggtgacagctggctaaaaaaagtattcttttcttatagtatagatatgaataatacaatgttttatgagtattattttttttaaaaatgtttttattttgtgcaaaataaaattccttagtatttttgagtttgatgatttttaaaaaaaattccaaaatctgaagaggtaacaatttttaattactcaacccaataacaaactaaatccaataaaagttggattggactgattaaacaaaaaaaattaaacaaatcaaattcaacacaattaagtttaattagattaaatttaaaaattaacaaaactcaattcaatccgattcaattttacctttaaattttcacactatttgaagaagtagaccgtaccattaataaatatccaccatcgtggatgtcattcacaaccatgagaaatgaccatgagcattaggagaaaatgaatttcgaatctaacatcaagttttaaataacattcgtggataattttgtatgcccatatataattttgtatgtgaagtctcacatgtcttatatgagcaaaggattacaacaaattgttgtctaaaatgttttccaacgtagaaaaagaagggttaaatggtatgtccaatatttcgacaatgcggttagcattccacatgtccaatatttcgacaattatatgatgctatattgttttaagatgatttctaatttctcataaacagatcttcttattgtattgtttaatccgggtaaactatactacttgttgttgccttagaagattgcatatgaaatcttaatatcatacttcatttcatcattttgcgcataagcacgggttgctccgctatattnnnnnnnnnnnnnnnnnnnnnnnnnnnnnnnnnnnnnnnnnnnnnnnnnnnnnnnnnnnnnnnnnnnnnnnnnnnnnnnnnnnnnnnnnnnnnnnnnnnnnnnnnnnnnnnnnnnnnnnnnnnnnnnnnnnnnnnnnnnnnnnnnnnnnnnnnnnnnnnnnnnnnnnnnnnnnnnnnnnnnnnnnnnnnnnnnnnnnnnnnnnnnnnnnnnnnnnnnnnnnnnnnnnnnnnnnnnnnnnnnnnnnnnnnnnnnnnnnnnnnnnnnnnnnnnnnnnnnnnnnnnnnnnnnnnnnnnnnnnnnnnnnnnnnnnnnnnnnnnnnnnnnnnnnnnnnnnnnnnnnnnnnnnnnnnnnnnnnnnnnnnnnnnnnnnnnnnnnnnnnnnnnnnnnnnnnnnnnnnnnnnnnnnnnnnnnnnnnnnnnnnnnnnnnnnnnnnnnnnnnnnnnnnnnnnnnnnnnnnnnnnnnnnnnnnnnnnnnnnnnnnnnnnnnnnnnnnnnnnnnnnnnnnnnnnnnnnnnnnnnnnnnnnnnnnnnnnnnnnnnnnnnnnnnnnnnnnnnnnnnnnnnnnnnnnnnnnnnnnnnnnnnnnnnnnnnnnnnnnnnnnnnnnnnnnnnnnnnnnnnnnnnnnnnnnnnnnnnnnnnnnnnnnnnnnnnnnnnnnnnnnnnnnnnnnnnnnnnnnnnnnnnnnnnnnnnnnnnnnnnnnnnnnnnnnnnnnnnnnnnnnnnnnnnnnnnnnnnnnnnnnnnnnnnnnnnnnnnnnnnnnnnnnnnnnnnnnnnnnnnnnnnnnnnnnnnnnnnnnnnnnnnnnnnnnnnnnnnnnnnnnnnnnnnnnnnnnnnnnnnnnnnnnnnnnnnnnnnnnnnnnnnnnnnnnnnnnnnnnnnnnnnnnnnnnnnnnnnnnnnnnnnnnnnnnnnnnnnnnnnnnnnnnnnnnnnnnnnnnnnnnnnnnnnnnnnnnnnnnnnnnnnnnnnnnnnnnnnnnnnnnnnnnnnnnnnnnnnnnnnnnnnnnnnnnnnnnnnnnnnnnnnnnnnnnnnnnnnnnngaagtcatttaaattaataagtttggttgttttatatcaaagagttaaactgttattttataattaatatattaactaatgttattatggttatcgtaacaattaaattaaaaaaagaatttaaaaatttcaattctttattatatttaaataataaaactataaatattttttaaaatgtcacaactttattttactgttatttattcattattttatatgatgaaaaattaaaaataaataatatatttaataaaactaaatattgttgattgtttgatatataattatgataaaactattttgattgttttaaaatatcaagatgctaagtttgttgctaccaaccattttcctacaaatcgaatcaaaataatcctgagtttattgagaaacatccaagtgaagaaaaagaaatgaaatatatcacaatgttgttgaaaaatctttttatcaccaccttatttggctgttcaactctatattaaggctcatgactgtgaagatactataacgtaacgatcatgacaaaaaaatgccaaacattaactgaaactatattaaacctcgaggctacttttcttttgggtacataaagcagacaactacttcctttcaaaaacaaacagacaattactttacattcaagtggtgtgacaatcaaaatacataggcactagcttcctgtgacagttgtaataacaaattgcctctaatttatgtgtcattcaagccctaaacaaccatgtcaatctaattttttacttatgattccatgtactatgagggtggaggtcttgtgttggttttctctggacctgcaaaatggtttaacataaacacattttacatacagtttgagcaccaatcaatcagcatcatattagtgccataaaataccatagtcaaatcgaaatttataacacccagctggatccaattcaataggttttggcaagtaaaggaaagagacaagcccaattaatgccaagggtggagaaatctgaatgacgaattcttaccttcaaacccatggatctccacttctcgcctttcttacacaacggcacaacagcaacacatcaaatgagaaagaaaatcatcaataaatcccccttgtgatttaggatttaggaagctggaaatgaaaaaataatggagctgaagaaaagaggaaaaagagaggaaaaaaatgaaaaagaaaagagagaaagacagaggtctgaaaagggagttacagctgagggagttttttaaaattcaaaattcaaatgattttgaatttcaaatgagctgaggcagtttcagaaggagcggaagtggaagaagctgagggagtttggtatgttgacacgtaattaccgaagttgagagttgctgtgagcatgacacgtcatttccgaagttgagaactgataaggaagcgacacgtcataaaaaagatgttgtactttgtggtaaaaaattcagaagcattattagatattttagctatctaagatcattgtgaatagcaaattcttcttctaagtaacttaattgtttatcaagacttgaaatacaaatctctaattaaactacaattatatcatgtgcaagttgctccataccggtaatcaaccatgttatactaactaattggcatagagttcatattttttttttttatatatacacatgtttattaatcaaatcattgctaaaatactgaaagacacataattatatatgaatcatattacattgaatcaacaatagtaagttcatttctcactgctgaaaatatccttcctaaataatctataaatactaaataaggagtatttaaatcttgtaattcaatgtaattatgctaagtctccttgacttaattcaccaactttttttatcggaaaaaaatagtggagtttctaacttcactatgccactaatgacttaataagcagcattcttgtctcaaaggtacgtcgacaggttgacatccgatccaacctagcagtaagtcaaacagcacaagacaaataacagagttatcctacttcttattatatgatgcttacattctcaatgtccagaattataccaaaaaatgcaattagagtgagtagaatttaaccaaactaactcaaagtaagaggataaaataggattccttaaggaaagaaacttcattatacaataaggccctctagatacaggggtactcacaaaattaaatcgaagtaattaatcagttatttaacagattgaactttaattgatcctcgcaactcagtcacatttgtcaatataataatatatgagaaaatcaaattaataaaactttattttctaccacaaaannnnnnnnnnnnnnnnnnnnnnnnnnnnnnnnnnnnnnnnnnnnnnnnnnnnnnnnnnnnnnnnnnnnnnnnnnnnnnnnnnnnnnnnnnnnnnnnnnnnnnnnnnnnnnnnnnnnnnnnnnnnnnnnnnnnnnnnnnnnnnnnnnnnnnnnnnnnnnnnnnnnnnnnnnnnnnnnnnnnnnnnnnnnnnnnnnnnnnnnnnnnnnnnnnnnnnnnnnnnnnnnnnnnnnnnnnnnnnnnnnnnnnnnnnnnnnnnnnnnnnnnnnnnnnnnnnnnnnnnnnnnnnnnnnnnnnnnnnnnnnnnnnnnnnnnnnnnnnnnnnnnnnnnnnnnnnnnaaaaaaaaaaaaaaaaaacagaacatggcatagcagcagacaaccaataccaagaaggaaattgaaagaccgaaagaatagatgaaggaaacttaatcataaaaatgaaggaaacttaataacttttcttgaatagaccggaagctctctcttatctatattttgtgtccttttttttcctccttgacaaagcacctagaatctcattgggtggtcatggccttttagtctagtaaatgaaattagaaaataacagattttcaaattagctcgagtgatatataacaattgaaatccatacccaactgcctcatctaccttcaccgtgaggagtagtaaaggtggagcatagagaaatcatacaattagaataaaacattagaattctactccatgagttgtttcaaaggattacgaaaccccaattgcacataaagaagaaaatattagcactgcaacacgtattagcattctaagatttactatatagtaagatttgtagaatttcatacctccacttattagcagtaaaggattaaatagaacaaataaatagatgacaaatacaatcaatatttattgtagcacccctggattgaagtgattggaaataaatcgaatctgataaaaatggaaatacagcaagttaatataaatggtaatcagcaagtaaattttatctcaacattattagtctgtaatttatatcacataataagaaattattggggggaatcttatgttaatttccataaagcacatttcttcttccagttgttaacttgaaaggttaacaataattccatattatagggataaactatgtttcttatacatttcaggtcaaaattagacttgtgcaattaatttagacctgtgcaaaatttactatagactataaaaaaaaacacgtgactaatcatttttttaatcattgatatggtgtatattattgataaccaccttggaaaacacgactaataaccattactaggtttaaattcgaatccaaaatctggtcatgcctgtttaaacctttatgacatattcctctttttaacttcttttatttcatttttttatgtttattttttattaaccagataaaattggatattataaaaaacactactaaacctatacatctcaataaacaaaatgttgtacatagacaagaaaagataacggtggtaaacacgtccgtaccccaaaaacaaatagtacaaaacttgaatttgatttttattaattagtctccaacatagatcatgacatatttagtggtagatcttaagttggaatcttagattactttttgatagattcttttataccaaataagattaaagatctcttaagatctcttacattttttttaatggtagatctcattttgagatcaaagaaagaaaaaaatgaagaaaatttattcttttttgaataatgtgcagatcttaagagatcttctatatgaactcattctccatgttggagatctcttcaactcctttattaaaagatctaataaagatcagatcttaaactcaagatctttatttaagatcttgtactaaagatactcatcttagattgaaggtgcaagtatgcctaactaagtctctatgtggctagaaatgcaacatagctaagcaaatttgtttagtggtcaagagcagaaattgcagggttaacaatatgtgcagcagccaagtcttcctcacatgacaaaggtccatcaccagcaattttggccaaatagttagcaattagaggatcgtctttcaacttaatcaaagaattcctaaacgattcaaccgtactttcatagtaattttcacatcttgcaatggcgggaacatctttggtcttcaccaatcccttaagaaagttttcaccctctattcccttcttcaatcccaactccaagattgcctctgcaagttcaagaaaattttttgcgcccaggactttaggatctgctcttagaatattcgtgcattcaatcttgttctgtgggttttcattgcaaatttgggcaattaggtcggaaccatcaccaagcactctagcatttgttagcgaaggagactgagaaacaagcaaagggtgagcaacagggaacactgtgataaagaattcattctgtggtagggagttttaatcgaaaggcacttggttgctaaggtgttgtcttcttttatagtcttgctgctaatattccacacttaatacgttatattatatatattattatcattaaattattaagatttttatgagattggtgggatcaaaatgaggatgatttaactctaaaaatgttacacgaaattcaaattgttaatagaaaatgatcttacgctttatactatatatatatatatattaattattcaaaaaaaatatagtaatttttaaaaaagttgtggcaaatcaaatacttaataataaaatcttttgatttggcttaaatcattaaaatatctatctgtttttttaaaaaaaaatattttactcttttaaaattacaccgatatatttatcttttttataatattatattttaaagatataaataaaatatcaaagcatttattacttagattgcaaatatttattatgttatcatgtaagcaattaaaataacatttagatagatgtttgactattcaaaaaaagaaaatatatttgagtttttgagcttatctttttacttaaaatataatattcaggaaaatattcttattttattcattaacaagatccttaaataaggaatattttgttacattttactatatttataatattcaatttcaaggaaacattcttaaattatttttttgaatgcatattttctaatccttgaactaaggaaatattttctaatcattaaattatattcatatcttcgtaatattatactttaaagctacagataaaattaaatatctcaaggcattcgtatttattattttagaatgcaaatatgtaatgtgttttcctatagttttttaatttaactttttttttacttacaaaagaaaaactgagtgaaacaattttcttaatagtatttannnnnnnnnnnnnnnnnnnnnnnnnnnnnnnnnnnnnnnnnnnnnnnnnnnnnnnnnnnnnnnnnnnnnnnnnnnnnnnnnnnnnnnnnnnnnnnnnnnnnnnnnnnnnnnnnnnnnnnnnnnnnnnnnnnnnnnnnnnnnnnnnnnnnnnnnnnnnnnnnnnnnnnnnnnnnnnnnnnnnnnnnnnnnnnnnnnnnnnnnnnnnnnnnnnnnnnnnnnnnnnnnnnnnnnnnnnnnnnnnnnnnnnnnnnnnnnnnnnnnnnnnnnnnnnnnnnnnnnnnnnnnnnnnnnnnnnnnnnnnnnnnnnnnnnnnnnnnnnnnnnnnnnnnnnnnnnnnnnnnnnnnnnnnnnnnnnnnnnnnnnnnnnnnnnnnnnnnnnnnnnnnnnnnnnnnnnnnnnnnnnnnnnnnnnnnnnnnnnnnnnnnnnnnnnnnnnnnnnnnnnnnnnnnnnnnnnnnnnnnnnnnnnnnnnnnnnnnnnnnnnnnnnnnnnnnnnnnnnnnnnnnnnnnnnnnnnnnnnnnnnnnnnnnnnnnnnnnnnnnnnnnnnnnnnnnnnnnnnnnnnnnnnnnnnnnnnnnnnnnnnnnnnnnnnnnnnnnnnnnnnnnnnnnnnnnnnnnnnnnnnnnnnnnnnnnnnnnnnnnnnnnnnnnnnnnnnnnnnnnnnnnnnnnnnnnnnnnnnnnnnnnnnnnnnnnnnnnnnnnnnnnnnnnnnnnnnnnnnnnnnnnnnnnnnnnnnnnnnnnnnnnnnnnnnnnnnnnnnnnnnnnnnnnnnnnnnnnnnnnnnnnnnnnnnnnnnnnnnnnnnnnnnnnnnnnnnnnnnnnnnnnnnnnnnnnnnnnnnnnnnnnnnnnnnnnnnnnnnnnnnnnnnnnnnnnnnnnnnnnnnnnnnnnnnnnnnnnnnnnnnnnnnnnnnnnnnnnnnnnnnnnnnnnnnnnnnnnnnnnnnnnnnnnnnnnnnnnnnnnnnnnnnnnnnnnnnnnnnnnnnnnnnnnnnnnnnnnnnnnnnnnnnnnnnnnnnnnnnnnnnnnnnnnnnnnnnnnnnnnnnnnnnnnnnnnnnnnnnnnnnnnnnnnnnnnnnnnnnnnnnnnnnnnnnnnnnnnnnnnnnnnnnnnnnnnnnnnnnnnnnnnnnnnnnnnnnnnnnnnnnnnnnnnnnnnnnnnnnnnnnnnnnnnnnnnnnnnnnnnnnnnnnnnnnnnnnnnnnnnnnnnnnnnnnnnnnnnnnnnnnnnnnnnnnnnnnnnnnnnnnnnnnnnnnnnnnnnnnnnnnnnnnnnnnnnnnnnnnnnnnnnnnnnnnnnnnnnnnnnnnnnnnnnnnnnnnnnnnnnnnnnnnnnnnnnnnnnnnnnnnnnnnnnnnnnnnnnnnnnnnnnnnnnnnnnnnnnnnnnnnnnnnnnnnnnnnnnnnnnnnnnnnnnnnnnnnnnnnnnnnnnnnnnnnnnnnnnnnnnnnnnnnnnnnnnnnnnnnnnnnnnnnnnnnnnnnnnnnnnnnnnnnnnnnnnnnnnnnnnnnnnnnnnnnnnnnnnnnnnnnnnnnnnnnnnnnnnnnnnnnnnnnnnnnnnnnnnnnnnnnnnnnnnnnnnnnnnnnnnnnnnnnnnnnnnnnnnnnnnnnnnnnnnnnnnnnnnnnnnnnnnnnnnnnnnnnnnnnnnnnnnnnnnnnnnnnnnnnnnnnnnnnnnnnnnnnnnnnnnnnnnnnnnnnnnnnnnnnnnnnnnnnnnnnnnnnnnnnnnnnnnnnnnnnnnnnnnnnnnnnnnnnnnnnnnnnnnnnnnnnnnnnnnnnnnnnnnnnnnnnnnnnnnnnnnnnnnnnnnnnnnnnnnnnnnnnnnnnnnnnnnnnnnnnnnnnnnnnnnnnnnnnnnnnnnnnnnnnnnnnnnnnnnnnnnnnnnnnnnnnnnnnnnnnnnnnnnnnnnnnnnnnnnnnnnnnnnnnnnnnnnnnnnnnnnnnnnnnnnnnnnnnnnnnnnnnnnnnnnnnnnnnnnnnttttttttttttttctttctcacttttacatcattcaagcattgattttaattaagaatattttgtgaaaaacaattaatgcaagtaacatattagattggatcatttaaaaatgatttaatttagactttataataagaattagctagaggtagtattatttaaacataaattaatatatatttataatattattttaaatatcatataaatattgatttttgattagttggtctattcgataaattttatatttacgatattgtttttctttttgtacgtaatgtaatgatgattttacacactcacacacacacatataaccccagacccacacccacaccatacgtatgatactctttttcccattagatttttaatatcacgttaattaaaattacctttaattttttcctcatgaaattagccgaggaaaaggtgaggaaacgtatcctttcagctttgggttaaaataaagtcaaatattgaattaatcacactttaataactcccttctgtttcttctatatatatatatatatatatgatgagtgtgtgatcccaactccacaattgtaagcatatataattaatcatccattgaagtggttagtgtgagtgtgaggatgcagggaattagattagtgttttcaataatgttggtggttgctggcattgaaggtgtgccacgtatatcgggtcaagcttgcaatggtaatttttttagtattcaacgggaatgccagaagtactatgaaccccaagggccaatgattccgccatctgcagcctgctgcaacaccctgaaagatgttgatgtcccttgcatgtgccaaattgctggcaattttcagtcatacttcagcggagaaaaaattgtctatgtcctcaggtcttgtggaaaatcagttcctcccggaacccgctgcggaagtatgtatatatatgtatctttctctcttttcttaattaattcttcaaaaatactattatctttactgtattagttcaagaatttaagaaatatatttttattgaaatgtataaaatatttttatgattatttatgctcttttatgaactttttaataaatattttttctttcaattttttaaccattcttctaacaacatctttaattcttatgcatgtatgtcacgtaccctctcctagctatttgacttcatgtacgtaacacattttaccttaaatatacatacaactttttaggctttattagtatatatgcacttcttgcgatttttgatccttaactataccgatgatgttacaacgcctgaaattgatatgaggctgatgttataaatgcttaattatatgtttgtaatttgtaacatgacatgtaaaaataagaggataattttttttcaaaatatccaagatgagcttagaattatcctcaaccctaagctccaatagtacgtaataccaaactactaaagtaataaaattttctaatatatagatgagagttactttaaatgaaatcaaatttgcacatgtatttattattactaaacagaacggttatatatactaaatatattannnnnnnnnnnnnnnnnnnnnnnnnnnnnnnnnnnnnnnnnnnnnnnnnnnnnnnnnnnnnnnnnnnnnnnnnnnnnnnnnnnnnnnnnnnnnnnnnnnnnnnnnnnnnnnnnnnnnnnnnnnnnnnnnnnnnnnnnnnnnnnnnnnnnnnnnnnnnnnnnnnnnnnnnnnnnnnnnnnnnnnnnnnnnnnnnnnnnnnnnnnnnnnnnnnnnnnnnnnnnnnnnnnnnnnnnnnnnnnnnnnnnnnnnnnnnnnnnnnnnnnnnnnnnnnnnnnnnnnnnnnnnnnnnnnnnnnnnnnnnnnnnnnnnnnnnnnnnnnnnnnnnnnnnnnnnnnnnnnnnnnnnnnnnnnnnnnnnnnnnnnnnnnnnnnnnnnnnnnnnnnnnnnnnnnnnnnnnnnnnnnnnnnnnnnnnnnnnnnnnnnnnnnnnnnnnnnnnnnnnnnnnnnnnnnnnnnnnnnnnnnnnnnnnnnnnnnnnnnnnnnnnnnnnnnnnnnnnnnnnnnnnnnnnnnnnatattattgttaatactagaaattatatatatatgtgcaattttgatttttattgaaggtatatgtgtatttatataactttcatttatatatgaaaaaatctattaatttattgtggtaagtattattttttttttggaattttgattgagagttataatctttatccttttcattttgtcagtttttttatttttcacacatcacatcatcataccatgttatcaaatatcatgtccaaattgagaaatcaaatcacacaattatgatatttgagataaaaatgcatttaaatctaaattttaacgggctccacaaaaagaaattaagtactccaccataaacatatttaatttctaaagtaattattataatattaataatttaatcattttcgacaatttatgttaatcggatgatattatatttttttttacttcttataatatatacccagatcataaacaacaatattctctgcttattttcaaagctttgcagtatgcaagctaatttcttgttttttattattattgagacgactaatactattaagccatgtttttcagattacattgctacttctcgtctggtgtgaacgtcaacattgaagacgtatgcatacaacttcccttaccttgggatccataaataactaaataatgccaaacatggcctgcatgcgtcattgcgtccaatatattgtgtttttctttttctgtttacaataaataaatatatttcactggtttatgtatgacaccgagctcaatgttaattcagatagcagtgatatatcatcccatgattttaattttctttgaaattattatatgaataaataaattgaatacttaatacaattctatttgataattcagataattactcggagaatgttaatgtatggagtattttaaaatattgaacttatcgaaatatttgttttaaggagctattcatgttatatagtaaatgttttttaagttatttattaaaagatttttttttcttatgtattaatccaacatctccagtacttttcaatttacataccgagactaagatcatgcaaccccttcaccctaatttctataagcnnnnnnnnnnnnnnnnnnnnnnnnnnnnnnnnnnnnnnnnnnnnnnnnnnnnnnnnnnnnnnnnnnnnnnnnnnnnnnnnnnnnnnnnnnnnnnnnnnnnnnnnnnnnnnnnnnnnnnnnnnnnnnnnnnnnnnnnnnnnnnnnnnnnnnnnnnnnnnnnnnnnnnnnnnnnnnnnnnnnnnnnnnnnnnnnnnnnnnnnnnnnnnnnnnnnnnnnnnnnnnnnnnnnnnnnnnnnnnnnnnnnnnnnnnnnnnnnnnnnnnnnnnnnnnnnnnnnnnnnnnnnnnnnnnnnnnnnnnnnnnnnnnnnnnnnnnnnnnnnnnnnnnnnnnnnnnnnnnnnnnnnnnnnnnnnnnnntttcataagatccttttctaatttcaagatatatttattattttttctttacatacttttcatttaattattctctttccaaatattaataagaaataattaagtagatagaaaaataagaaaaaaatagttttaaaatgataataaaagtataattgacacatttattatgattaactactttttctaatgaatataatttaattgaaatcatcttataattagtaatgaagaaaatatagtcattgcgtttatttttgttaaggttaaattatatcatattcacctcatgtattcttggacacaaacccaattacatctcatatccttacacacaaccaattataaacttacaattaataaaataaaaacaaataatttcaacctctaaaataaaaaacactaatattttcaataaataaataaatgaaacccacaattttctcttgatatttttcttccgtaaccgtcttctttatcttatttatgtattaatacctttattacatttatattcataatattcaccatagctatggagtattggccggctaatatatatatatataaaataaggaacagtgaaggctttatgcctaattggaattcactatctaaagattaaatggtagtacgtagattattaatttgtctatgaaaggtaaatgatggtcatcgttgcaaatggcgtagcgagaaatttatatattactattagggatcgttgagaaatgaaagttgttttcagggatttatgattcagacaaatgacaatggttgatcgcacaatcgtcgataattttcaaaacatacagtacacgtttaacgtttttttattggggctaatatacggcgcatcaaagtatttacgaattagaatatnnnnnnnnnnnnnnnnnnnnnnnnnnnnnnnnnnnnnnnnnnnnnnnnnnnnnnnnnnnnnnnnnnnnnnnnnnnnnnnnnnnnnnnnnnnnnnnnnnnnnnnnnnnnnnnnnnnnnnnnnnnnnnnnnnnnnnnnnnnnnnnnnnnnnnnnnnnnnnnnnnnnnnnnnnnnnnnnnnnnnnnnnnnnnnnnnnnnnnnnnnnnnnnnnnnnnnnnnnnnnnnnnnnnnnnnnnnnnnnnnnnnnnnnnnnnnnnnnnnnnnnnnnnnnnnnnnnnnnnnnnnnnnnnnnnnnnnnnnnnnnnnnnnnnnnnnnnnnnnnnnnnnnnnnnnnnnnnnnnnnnnnnnnnnnnnnnnnnnnnnnnnnnnnnnnnnnnnnnnnnnnnnnnnnnnnnnnnnnnnnnnnnnnnnnnnnnnnnnnnnnnnnnnnnnnnnnnnnnnnnnnaaggggaaatatttagtgtaaacatttaagaataaaatatataaatttgagtcatataacgttaaataattaagattaaaaattaattaatagtcacatgatgattttaatttttaataaattatctttatttatcttttaacaatgatcatttagatattagctgataatttacatttgttaggacaaatgataaaacaaatctttcaaatgttttattgatttatgtaaaggggtttagtttatttgattaaatagagtctttgagttatcgtaaatttttttatacttatcaattttcacgaataaaaagtatattttgaatgatcttatattaagagctaaattgactaaggaaatgagtcataatcattatggagaacatgcatggtccaacaatcttttatatttaatatctatagatagtattgtcatgaacttagccgttttagaaccatcaatgattggggaactcattgatccatttgcaactccttaaaaatattatctgaacaatatttctttctcatacttcaaatgctttgtagagtgctcaataaggtgttcttttaatagtttccatacctataagattattaacgatatcctttttagataatgttaataaattccaaaattcattatgtcctttagtcactactagtaatgacgactatcttttctattggtaatgtagttgttctttggttaggtattgaaataatattacccattgagaaatccctatattttttaaacttacaaaattgattcaattttaaaataaaaatagaatatgatgtgtattgtatatttaaggagaattcttttaaaacaactaatttctaaatacatctatttcattttagatctattctaaacatatgaatttgttctaaatatttaaattacatattttcttattgtaagtttatcaaaagaaagaaataatttctttcaaaagatcatgtgatacacttgttacaaagactagtggtgacagatttggataatacacataaggtcatagccgtaactaggttcgaactttaatatgatacacgcacaaaaacttattacgaagaaatgatataatttcttaaacaaggagatagcaaaacacattttttaaaattaattataatttcatgtaacatcttcatattgattttctagttttttttattaaatattttttctatttttaaatattaaataaatttattatttataaaatatttcgaagactaattaaaagtatcatttcttataaaagagtgaaaaaattaataaaaataacagataaaaaacataaataaattaagaagtaattttaatataaataaaaagatattaataaggacatatattaagtggtctttatatatatatatatatatatatatgtatattcttaactcgtcttctgtgttcgatataataatgaaacaacctaaaaggaaaataaattactatcccacaagcacaagtgaatgtctacttcattatttcaattaaaaaattcaatcatattattattgtatcaaaaaaaaaaagaacacattattgaggcaatatattcgacgcgtgctgtaatgctcgtgcatagatatccacatacacacatatatatatatacatatatattaggcttttgcttctggctctggtttgttcttggctttgtttccctgcttgtgcttcaaaaagttatgattaagataaacaaatattctttctaaaaatattattgataatttttaatcttgttatctttgattattttatcattttttcctttagattgttctattattttttattttaatgtctttgctacaaaaagatgtcttgagtagttatattcaatgagagcaaaatgtagtgtcccacctacttaatgagagcaagatgtcgtgacccacctactgacctacctacccaaacacgcacttctaaaaggaatttgacttggttataaaaaaaaatctggaaggaccggacttggaatgaagtgagacagggtgagagtgactattgcggaaaggggaggagataggagggttaagagcatctccaatgcaaggaatccaaataggttttttaagtaattttttgtgatccccgcagtattttttgtggcccccatagcgccatgtcacagttagctccaatgcaagaaatcataaggaacttaaaaaaatccacatatttataatttttttaataaaacttatcactttttcaatttttataaatataaattaaaataaataaaacaaaatatataacaatataaaataaaattttacataataataattaattaaatataataacataaaaaaacatagacatcaaaaataaaaaataaaaattgaagataaattaaaacacaaaaaattaaaaatgtgaattgcattgccaagaagaaaaaaaaaaacctataattgtaaacaaacattcattcaaaagtatttttctctaatggtaatatttattaaagttacttctctatgcatttattagttttnnnnnnnnnnnnnnnnnnnnnnnnnnnnnnnnnnnnnnnnnnnnnnnnnnnnnnnnnnnnnnnnnnnnnnnnnnnnnnnnnnnnnnnnnnnnnnnnnnnnnnnnnnnnnnnnnnnnnnnnnnnnnnnnnnnnnnnnnnnnnnnnnnnnnnnnnnnnnnnnnnnnnnnnnnnnnnnnnnnnnnnnnnnnnnnnnnnnnnnnnnnnnnnnnnnnnnnnnnnnnnnnnnnnnnnnnnnnnnnnnnnnnnnnnnnnnnnnnnnnnnnnnnnnnnnnnnnnnnnnnnnnnnnnnnnnnnnnnnnnnnnnnnnnnnnnnnnnnnnnnnnnnnnnnnnnnnnnnnnnnnnnnnnnnnnnnnnnnnnnnnnnnnnnnnnnnnnnnnnnnnnnnnnnnnnnnnnnnnnnnnnnnnnnnnnnnnnnnnnnnnnnnnnnnnnnnnnnnnnnnnnnnnnnnnnnnnnnnnnnnnnnnnnnnnnnnnnnnnnnnnnnnnnnnnnnnnnnnnnnnnnnnnnnnnnnnnnnnnnnnnnnnnnnnnnnnnnnnnnnnnnnnnnnnnnnnnnnnnnnnnnnnnnnnnnnnnnnnnnnnnnnnnnnnnnnnnnnnnnnnnnnnnnnnnnnnnnnnnnnnnnnnnnnnnnnnnnnnnnnnnnnnnnnnnnnnnnnnnnnnnnnnnnnnnnnnnnnnnnnnnnnnnnnnnnnnnnnnnnnnnnnnnnnnnnnnncaatcactattttttttttaacttctgttctcaacttaactggtagttatgcttttttttttttttttaagaaaaaaattaacctttggttaaaatcccaatccacgcttccagacccttccatttccataagctccacccacctctccgtcttctttctatgcatactcatgttctcaacccacacttcttttctcaactttcttttttaaagttgagccttctttctctgcttcctcacacagcagcggcggtgagaagtggatgcggcggtggggttgccgtagagcgcggcctcgagaaggcggtttaggatggcaaaagaggtggcgacgcgaggtgtggcctccttccttctttctctgttcacggtcagtggtacttcgttcacgatcggtggagtctctcggcacgaggtgcggcctccttctttctttctttccttctttctctgtttaatatttattattgaaactgttcatcttcttccttttgttgaatcactttgatgttgctgtggactgtgatcgggaataacaagaataacgattttcagaccaaaataatattttttaatccacaagaaacggttccttatataaggaacccaccgtccgcggaagaaacccgttccgccacgtcagtatgctccaacgcacaagaaacggatgcttattctaagaaatccactaagcatctcccagcatctcccattggagatgctctaggatgggtcacccccaaattttattaatataaattttattatatatattaaaaatcaaaaattaaaaaagtaatttaataataaaaagattatattacataatataataagatataatattttttaatattacattaaaaaaatagaataaaatattttgaaattgaattacataatataatagaaatttttaaaatcacattacataataataagataaaatattttttaagattgcattcaaatataatatataatattttttaatattgtataaaaaataggataacgaatgataagtattataagtgattaccaataagcttttacttttacattgaagttgctgtataattcaagatgatgaaaaattggtttgtgaaaataattgtgattgtgaggggtgttttggagccaatagtgacactggatgctttggagaaacagcctcaaccattgactatgttgtatgagatgtgccaaaagaaggcaggttgatataaaacaatcaagggaaggacatgcaagtgttgctaaggtgtttgttgtctcctctttttctcaaaaggatcttgaaagcttgaaactgcaaagattggcttgcgtaaactcgcacattccgataagtttgccactaacatgaagctcaacttttattgctgatgaaaatggtaccttggttgttgaagcacccaaaaataaacttagtaagatttgtgcggttaaaaaatggcctataccagactgcatgtacagttccttaacatgattttcttcagattccttaacatgtactgctgatgcaggccattttttaaccgcacaaatctcactaagtttatttttgggtgcttcaacaaccaaggtaccattttcatgagcttcatgttagtggcaaacttatcggtggaaggcaccacatgtgcgagtttactcatgccaatcttggcagtttcaagctttacaagatccttttgagaaaaagaggagttcctcaaaccagttcgattaacgcttcccccttatcttccacatcaatatccaatgctttgggcattagttgcaaatttgccatctttgtcgctgaccaccaccatgagatgagttccttttttttctttctttttttctctcttcctttctttctttttttctctcttcctgacagatttagttcatgattggctgtgtgtatgttcttggatgttttatattgtgtgtttaggtctgatttgatcaacgaggtatcaatgggttttgattgaggagattcttctatttggtcaactgaattatcgaattggttccttactcttatcttggtgagttttgaacttgtttggattgatgaaaataaatagaatgagataaagtggaatataatggaataaaatttccagtctattggttgcatatattataatagcatggaactaaatttacattctattatttaaaagaaaaaaatgaataattattttactctcatattatatttaatctctaacaatctcctttacccatatagatgaagagaagttttttatttttgaaatatatggctcattatgattttaatatttgcattcaattaagaggtgactatgctcatcagctcatgtatacttcactcttaacatcaaacggaaagatagttcccttcccattcaattcttcattctctctatacatgcccaactgaaaatcctattttatgtatgtagaaaccccagaaagtcttgttctcacgaccccgtcttatgatcggatcctcctccaccttgttgtgcaggaaccggattgactctaatattatgaagcaactgctgtagccatctcctagctgttgggtgttcctgaataaataaaaccaaaaccataaaaaaatgtaaacatcctaaaaccatgaataatctcttcataagaagaggagaaaaatctccctcggaaatttgaagagagcgagctttacaagttaatgccctatggttaatcttcaattcacgtaatcaactcacttcaatcttattgattaaatcaaatttttatactaataatgtcacttacacgaagacaactactgaatgtagcatctcttaacacggctggaagacaggttcttaatgcatgacaagctctgttttgaaatgaccaaagttttattagaaacttgggaagaacgtaaaggacatgggcagaactgcagaagcacttataaaactggagttactatctacttaacaaacctctgattttctgacagacgaagataacaacgaataatgaccttcaaaagacgacatgaaggttgctgaacaagagttaccaccatcgttccgaaaactatatatacttgaaaaaggcgccctgctgaagtacaaatatgtttcataccattttcaactgacagaatttgttcaactataaaggttccaacatgcagttggtggaacttccattagattacacacaaattttcccattacaattattttgataggcataaaaagaggatcacgagatagtggcaaaaacaaacacttggcttagcatttacaatgcaccacaagtacaacgcaagagttaaacagacgtgttatttaacgatttagatctcaagtatcaacgacggggtatttcaacccatgtaactacaaatactggtgtcgagttgcattttgatacaaccaagaggagtgtttgcaacactcttaaaattctttttattttttattagtttaaatttattgaaaattataatagtgattcttacttctcgttttatgagtctctgtcctaatttaaaagtggaacttaccaaagtttgtgattttcaacaaatttcaaccaataatagaatgttaaaaggagtattgctagcactcttctacaatcaaatatgtcaagaagagtttcaacagtcctgtgataaccactaaaaaaacttatattaagaccaacagttcaaaagatgaaaaaaagagagttcttaaatgatatccctccccaagttcacatagtatccatttatcttatgccaagaccactttcctcagttgtaatctcattgatcagataaatggtatgctaattgccttacacctcctatgtagcattgtattggaacatgcttcacatgcatacatgttcatcatacatacccaaaaaatgtaactcagaaaaatgaagcaaataaaaatcaagtttaattcatccaaataaaatattttattgaaccaaattggtttaaaacaagatcagtaaacttacagtttttgacaattcaccgcctatttgcatactatgcaggcaaagcggaagaaactgttgaaagaaggaaacttatagctgctgtattatgaaactggtgaaatatcaacagaaaggaaattcaacacatgacaaaactcaagtataaannnnnnnnnnnnnnnnnnnnnnnnnnnnnnnnnnnnnnnnnnnnnnnnnnnnnnnnnnnnnnnnnnnnnnnnnnnnnnnnnnnnnnnnnnnnnnnnnnnnnnnnnnnnnnnnnnnnnnnnnnnnnnnnnnnnnnnnnnnnnnnnnnnnnnnnnnnnnnnnnnnnnnnnnnnnnnnnnnnnnnnnnnnnnnnnnnnnnnnnnnnnnnnnnnnnnnnnnnnnnnnnnnnnnnnnnnnnnnnnnnnnnnnnnnnnnnnnnnnnnnnnnnnnnnnnnnnnnnnnnnnnnnnnnnnnnnnnnnnnnnnnnnnnnnnnnnnnnnnnnnnnnnnnnnnnnnnnnnnnnnnnnnnnnnnnnnnnnnnnnnnnnnnnnnnnnnnnnnnnnnnnnnnnnnnnnnnnnnnnnnnnnnnnnnnnnnnnnnnnnnnnnnnnnnnnnnnnnnnnnnnnnnnnnnnnnnnnnnnnnnnnnnnnnnnnnnnnnaaaaaaaaaacaatagcttcatcccactaggaaaaaaaaccaacaatatcttgaagggcataaaatagttcggaaaattttgttccctgatactagcgatgaactaatccgaacaagttgagttgtatgtacctgttacatcatagaaaattattacaggaatgaatttgaaacttaacaaatagttgaaaatctacatgaacattataagattataacaagactaattatttgtggcaactaaaatatttacacatttacctgtgtgccgcagatttataataatcaataatcagttattactgttttttaaatgacatattagttgaggttattgtagtatttagttttttatggcaaggtttattgtgacaataatttactaattgaaattattctctgttcagcataaatgttgtataaaaaattattcttctcatagtctagtgtattcaataacagaatcagcaaggacgtagtatcttcactaaggcaccaatgactccaagactggtaagcctcatattctcaaatggattggccatactggttgtattaagcaagggatacatatatagaggtatacgagctgcagatgagaaaaaggtaagtgtaaagagtgaacagagtcatatctttttccttaaagtgttagtttcaatgagcaaaaaccctgctgaaacggatatggtaatgtcaaagcaatctccttaattttatattaacaaaagaacaactaatatgcttttcaattgcccaaaagtttctgtccatggatgcttatgaaagtatattggcagtaaaaaaaatataagnnnnnnnnnnnnnnnnnnnnnnnnnnnnnnnnnnnnnnnnnnnnnnnnnnnnnnnnnnnnnnnnnnnnnnnnnnnnnnnnnnnnnnnnnnnnnnnnnnnnnnnnnnnnnnnnnnnnnnnnnnnnnnnnnnnnnnnnnnnnnnnnnnnnnnnnnnnnnnnnnnnnnnnnnnnnnnnnnnnnnnnnnnnnnnnnnnnnnnnnnnnnnnnnnnnnnnnnnnnnnnnnnnnnnnnnnnnnnnnnnnnnnnnnnnnnnnnnnnnnnnnnnnnnnnnnnnnnnnnnnnnnnnnnnnnnnnnnnnnnnnnnnnnnnnnnnnnnnnnnnnnnnnnnnnnnnnnnnnnnnnnnnnnnnnnnnnnnnnnnnnnnnnnnnnnnnnnnnnnnnnnnnnnnnnnnnnnnnnnnnnnnnnnnnnnnnagaaagttaaaaagaaaaaaagaggaaggagaaggagaagaaaaagagaaaataaaataaaaataaaagaaaataagataaaagaaaagaatggtaaaagaaataggagaaaaataaatgcaaaagaaaacttataacaattttaatcatcttttatgaaattttatagtttaacaaattatttcttacttttaaattggttgcaattggttgcttttacaatatcttataacaattttaaataaatgcaaaagaaaatttattagtgagaaaaaaagggaaaatatatctaggagatgataagatatcaacaatcattttatatgtattgaacatataccgtacaaaagcaaagtttgggaacaacatcaaccacaaaaatacatgaatcatgcaatgccgtttgactcagttgaagaccaaattttcaaagatactatttatcataaataatattatttaccaaacagaagttcacggtccttcaggtgaataagaaaaatatcattaccatggaggaattccatccttatattggggtgagatgccacactgtaagatatccatgagagcaaaagatatgtgttagtaagaaagcattgaagataaggagaaaaagcccagacaaagtatatgtgagcggacctgaagaagaacaagagctttgcacactcgatttgagtgtgcttgagtcaggccttggaagaaaaaaaaatcctagtgagtggtgggcaacaaaggtcaaagaagcacctcttcattgaggaaaaaaaactaaaaataaataaattaggagcatgtttaattctctctttttataataaaaaaattatactactcaacaatgtatatatcatctaaaatctattaagttttgaaaattgtttttaaaacaaaccaaaatgcgtcaaagtacaaccaaattttcaagactatacataaaacggggatttgaaacaaacaaggtattcaagaaacaaaatattagtcagtatttatggggctattcattcataaaaaatataaaaagacaagaaagataaaaaaaaaaaaatgcaaaagaaagccaagagtgacaaaaggaatatgtaataatacctgtaaaaattttcttctgatccagtcatgtcgtttagaaggacaccacttgtcatggatgagcttgattttgctcagaagagaaaggagagtgaagatgatgatattgatgatgatcatcaaagtgtggaggaccttcatgttgatgtatgtactatatatgtagccaaactcacatttaaatatttccttagatttaataattgtaattttaccttaattatatatatgggcacctaattatgttcttgttgtgttaatttatagaccagctcagatcttcttacgaagaatgatactggtgtcaatagatcaacgaaagaagatgcggcattggaaactatggacgataagagctacgaggtaccctaattagttgttgtgtctaggtatatatgttatatatgtttcttgacaaaaggaatatgtaataatacatctgtctatatgcttcttgaaacttacattttaaaaactatactcagggcgcttgggtgttattgaccatgacgtagttgagctgaataatatgcataggcaggtattgtattatctgttttaccttcccaccctcttttggcatagccggtgcaacacgtacattgtgaattgttgtgtttgtgtctggcatcagcctttgggcgtttgcacttttgcgattacaaggtgttaatatgtgtcttgcttctgtgtttgtgttcgtttactgattttttttaattaacttcactatttttattaatttggacaagttggtgctttatttcaggttatccacacggaagcatatgttggtaagccgaaagtgaaatctgctgctgctgcttgtcgctcgtaggttactttttcaccaaccattcatcacatcaatttttgttgacaaactgcaaataaaatcccatgagaaattttctttttcaaatgtatgttattgtaatatttgtatcatcattgttcttggaactaagatattttgaatattaggatcaactccactattcaagttgtggaacatgaagaagctttgcggacttccaacgctttggaaattctcagcaagtataatttctataataagattgatttttctttttgcttgaggcctctttcttctatacttacattttacatttcattttttatattaccactgactatttttttttttttttgtaattatgtgaatttggtagatatgatataatagtagatgcaacagataatgctcctacccgatacttgatcggtgattgctgtgtggttctaggaaaggtaaatcttaatgttttgatgtatgaacagattgtgaccatttgaattgatgtcacatgggccttttcacttgttgctttaattttttggttcctccatgaatacactttctaagtcagcattatttttaatgttttggttcatcaatgcaaaagatatctacattaattcaacaaaaaggaagttatgcatgctcctatgtgcatgatacctataaaatatttcagtgtgtatgtgccatatgagttgttatctccaaaatctttgtgcaattgctcccagtagacatcaattttttataaatttgaaaagttacaattatatgaatttcttatatttcattccgttaaacaatttcgtttttgtgaataatagtgttcaatttataaccaatgttcgacaagacatgcatagggattggaaagaggggcatagggattagagtaataaggaggtcatagttttatagtttgaaaggaatcaattgagattgttctcaattgtatgaaattagacaaatcgactcattctaactatgaaaaactcaaatagaatttcatttttcatggtgctatatcaaatcataacatttgtaatgctagatcaaattaggtcattttttcttatgacactctgaatcaaataaggtcattcaaaaaataaaagaagcaagacacttgaggatattgtgataggttgttctcattcaaaaaaatacaaaagagcaagatgagaaatttatttgtgcacatgtaaaaggttgacatatgaagggttgccccaagtacagtaactagtgtgcgaagaaggatcaactctttacttttgtttgttatgaaattaattagtttgtatacccaaggacaataacgggtagattcttgtgctaccgtgtatgtaaggttacttgtgaagtcatgtataannnnnnnnnnnnnnnnnnnnnnnnnnnnnnnnnnnnnnnnnnnnnnnnnnnnnnnnnnnnnnnnnnnnnnnnnnnnnnnnnnnnnnnnnnnnnnnnnnnnnnnnnnnnnnnnnnnnnnnnnnnnnnnnnnnnnnnnnnnnnnnnnnnnnnnnnnnnnnnnnnnnnnnnnnnnnnnnnnnnnnnnnnnnnnnnnnnnnnnnnnnnnnnnnnnnnnnnnnnnnnnnnnnnnnnnnnnnnnnnnnnnnnnnnnnnnnnnnnnnnnnnnnnnnnnnnnnnnnnnnnnnnnnnnnnnnnnnnnnnnnnnnnnnnnnnnnnnnnnnnnnnnnnnnnnnnnnnnnnnnnnnnnnnnnnnnnnnnnnnnnnnnnnnnnnnnnnnnnnnnnnnnnnnnnnnnnnnnnnnnnnnnnnnnnnnnnnnnnnnnnnnnnnnnnnnnnnnnnnnnnnnnnnnnnnnnnnnnnnnnnnnnnnnnnnnnnnnnnnnnnnnnnnnnnnnnnnnnnnnnnnnnnnnnnnnnnnnnnnnnnnnnnnnnnnnnnnnnnnnnnnnnnnnnnnnnnnnnnnnnnnnnnnnnnnnnnnnnnnnnnnnnnnnnnnnnnnnnnnnnnnnnnnnnnnnnnnnnnnnnnnnnnnnnnnnnnnnnnnnnnnnnnnnnnnnnnnnnnnnnnnnnnnnnnnnnnnnnnnnnnnnnnnnnnnnnnnnnnnnnnnnnnnnnnnnnnnnnnnnnnnnnnnnnnnnnnnnnnnnnnnnnnnnnnnnnnnnnnnnnnnnnnnnnnnnnnnnnnnnnnnnnnnnnnnnnnnnnnnnnnnnnnnnnnnnnnnnnnnnnnnnnnnnnnnnnnnnnnnnnnnnnnnnnnnnnnnnnnnnnnnnnnnnnnnnnnnnnnnnnnnnnnnnnnnnnnnnnnnnnnnnnnnnnnnnnnnnnnnnnnnnnnnnnnnnnnnnnnnnnnnnnnnnnnnnnnnnnnnnnnnnnnnnnnnnnnnnnnnnnnnnnnnnnnnnnnnnnnnnnnnnnnnnnnnnnnnnnnnnnnnnnnnnnnnnnnnnnnnnnnnnnnnnnnnnnnnnnnnnnnnnnnnnnnnnnnnnnnnnnnnnnnnnnnnnnnnnnnnnnnnnnnnnnnnnnnnnnnnnnnnnnnnnnnnnnnnnnnnnnnnnnnnnnnnnnnnnnnnnnnnnnnnnnnnnnnnnnnnnnnnnnnnnnnnnnnnnnnnnnnnnnnnnnnnnnnnnnnnnnnnnnnnnnnnnnnnnnnnnnnnnnnnnnnnnnnnnnnnnnnnnnnnnnnnnnnnnnnnnnnnnnnnnnnnnnnnnnnnnnnnnnnnnnnnnnnnnnnnnnnnnnnnnnnnnnnnnnnnnnnnnnnnnnnnnnnnnnnnnnnnnnnnnnnnnnnnnnnnnnnnnnnnnnnnnnnnnnnnnnnnnnnnnnnnnnnnnnnnnnnnnnnnnnnnnnnnnnnnnnnnnnnnnnnnnnnnnnnnnnnnnnnnnnnnnnnnnnnnnnnnnnnnnnnnnnnnnnnnnnnnnnnnnnnnnnnnnnnnnnnnnnnnnnnnnnnnnnnnnnnnnnnnnnnnnnnnnnnnnnnnnnnnnnnnnnnnnnnnnnnnnnnnnnnnnnnnnnnnnnnnnnnnnnnnnnnnnnnnnnnnnnnnnnnnnnnnnnnnnnnnnnnnnnnnnnnnnnnnnnnnnnnnnnnnnnnnnnnnnnnnnnnnnnnnnnnnnnnnnnnnnnnnnnnnnnnnnnnnnnnnnnnnnnnnnnnnnnnnnnnnnnnnnnnnnnnnnnnnnnnnnnnnnnnnnnnnnnnnnnnnnnnnnnnnnnnnnnnnnnnnnnnnnnnnnnnnnnnnnnnnnnnnnnnnnnnnnnnnnnnnnnnnnnnnnnnnnnnnnnnnnnnnnnnnnnnnnnnnnnnnnnnnnnnnnnnnnnnnnnnnnnnnnnnnnnnnnnnnnnnnnnnnnnnnnnnnnnnnnnnnnnnnnnnnnnnnnnnnnnnnnnnnnnnnnnnnnnnnnnnnnnnnnnnnnnnnnnnnnnnnnnnnnnnnnnnnnnnnnnnnnnnnnnnnnnnnnnnnnnnnnnnnnnnnnnnnnnnnnnnnnnnnnnnnnnnnnngagtaaaaataatttgtattaaaataaatttgaaaaataatttatatattaatttatgaaatttagttataaattggtaaaattaaaattaaaatatataaaatgatttaaaatataattaaaaatatttatatattaaattgttttaattcaaaaaattaatatctcttaactaatgatgggaaatagtgtttataaaattaaactaaataaaataaatattttaatgatttaatatcttatatttaaaataaaagttataagtttaatttctgtcaaaatcttttttatttttcattttatttaatttcttatctcataattattatgtcaattatttacataaacattacctaaacaccaatatgacacatcaaaatcaatgtttgactttagatggttaattaattatcaatttgatggaagaaccaaaattacttattctaaaaaataaaaaattaaatgtcttgatttaaaaataaaaaattatcaaaataattggtgatttgtcagtagaaacaataagaaacctgatataaaatattattttcattagagctatagaaactcatatccaaatttacaatactaaaatatcataacttttcatagtgtataaaataaacgttgtagttgaatacaaacttttttttttcactgtataaagtagataaatgagaattaattctaaatccaacatgatgaaaaaaaagtaaaatgtgttacgaaatgtttttatttgactactatacattgctataatttgtattctcgagtaactttattacaatttattctaaaataaaatatgttattttatcacgttacctttttttcttcaaaaaattggccgtcgaaaaggtgagaaagaaagggagtaaaaagattccaaattgaaacgtatcggttcaggtatggttaaaaagaaagtcagctttttaattaatcacattttaataaccataaggaaataaacttggagttggttaacgccacaagttattttattttattaaaaaatggcttccttttgtttcttgtataaatacgtgatgtcaattgtagggttgttagcataataatctgtcatcaatccaatttgtgagcaaagttgattttggattagaaagaagttgaagttaagtgtgaggatgggaattagagggagcttagtgtttgcaatgttggtgcttggtggcatctcagctgaaacagaaactgaaggcatattattaggaacaccaccgacaccaattgtggcaggtttgtgtcacacattgggccaaaggaaccgccatcagaagcctgctgccaagccctagaaggtgctgacattccctgcctatgccaatattttactctttatgctcttttcttcagcattgaaaaaggtgtctatgtgctcaataactgtggtatcccagttccacccggaaccccctgcggaagtaagttttctatcatccatactccttactctgctttcttaattagtaatatagaaaattctattaacttagaaaaggtgcatgcgttaaaagaattgattaacatattcttaataatattctttcgcatagggagaagtcttttaaacaatattcttcacctgaatgcacccaggacgacctattaggttagtgatagagcacgcctgcccctgatgactgtgtcattgggtccagattgcgaggactctcaatcacatggatagatagatagtttaatgtgctcaccgacacgatcctgagatgtgaatcatccaagacacattagtacttcttctcctgattgaactttcaatgatttggtgtatggaagcttatttcctgaatttttgtttttctttggtattgagagaggactcatactatgaagccgtgcttttcaggttacacttttcctcctgcttctgctcctcctcgttcggagtgaacgacaacatggaaaacgtatgcatacaacttccctttggatccctaactcactaaataagtccaacatgcatggcctgcatgccgcatgcgtcattgcgtttcactatttttctttttagtggtttataataatatttcactggtttatgttagatactgagttcaatgataattgagacaacattgatatatctttttctatgatcttaattttcatcataattcttctaatattttaaaaaactattaaatgaaaactaaacataattaattatataagcacttaacaccactttatttaataatttataatcactctatctttaattactagtacttcttctgtgctgggggaatccttctcggggtataggattttgttgtaatgatactcgtgtagctcatattctgtacactggtgcctttcttctaataataattttggcttataaaaaaaacattttatttaataattcggacaattacttagacaatgttacttttaaaggaggattttaaaatattaatctaatcgaaatacttgttttaaggaactcttcgtgttgtagagtatttaaaaggaaaacattttctcatctatatatccaacaaaagttaattaaatcaattccatgttcggataaatctaaactcaaagtgaattttttaaagaaaaaaaactcaatataaaggcatataatatcctaaaaatttaaagaacacaatatttcttaatcttgttttgttcaaaaagtacattagactttataagggagataaaaagagctaggcgaaaaaaaaattgaacagtgtgcttggaaaattaatttaatgtattcaaaattaatgtcttgccacttaactaattcatcttagcggaggagaaaacattcctagtttaaatatttgaaagataaacaaatagtatataatacaataatataagattacttttgtacgtattctcattactttttattctatgtttggtaagaataaaaatagaaagagttttcttttgtttttgttgaatgaataaaaatagaaagagtggaaaaaagaaaaaagaaagaaagaaaaagatgcatgcttcttttgtttgattgttccgtacgagtagaagaaattaaccattagttttgatagcccgtgttaaaaggtctttatgctcaatttaggagaaatgtaggaggtagaacaccaatttggaataaaaatttgtttcaaaataaattttatttaattttttaatgtaatattaattattattatttttatttatatcctttataatattaataatagacaataaaaactataaatgaactaataataatataaggttaattttataaattattattctcttttaattattttttattttttattgatctacttaaaatataagactataattattttggaatggaagagagtaatgtattcctttcttattatcaaagtcaaatatttagttaacgctcttgctaaaaatctgttacacgtataaatataaacatgtcaatcacatattattagtgtctaatgaaatttaccaataaaaatatttttttatttttatcaagatcaaattaacataaaattttttaaaaaacaaaattaatatcatattttatcgtaacctcaaatatattgtatcttttattatattatacattagaaaatgtacacaatttttaatgtgcttattactttttgtcttctaaaaaaacttcctcgcatggttatccggcagttgacacattttataactgtaaagtgtaaactctgaaacttgggaccaccagaaaattactgaaattgttacattttgattttaaaataaacacttaaaaagacaatatctatcttttatccgatcaacaggttctgtgttgtgtctgtctgctgtgagtgctgagagacaatggaggtgtgcactcaaaccttcacaaatttccttcttttcaacccttcttcctcttcaaactctcttcctcttcgtgctaatgccaacactaaaacacccttcaaattcaattcccttaaactctcatctttttcgcctcatattcacctcttccaacccttcctctctcctcacacttcttctcccttcacactctcagctgctgcttcttcttcttcttcttcagtttcagttggcacagaacaggaccgtcttccagcagaattgaaggtcactgaaacagcggaacccaattccagagtatgttctttttcttttctttttttttcctttatctttatttctcagtttggttcaactcaacaatcatatgtgaatcatatgtagtttgctatctaatttataaagggtaatgataattgtgaaatatatgcaaggtgtatttttctcttcaacatgaccatatcttgttacttaaacaataggagaggattcaaattccatgcaaccattattaatcaattgcaaaagaaagccttaaaaataagataatggtaagcaagtgagcacatattctggaccagaattcatatcactgaatatgtacttttgcatctctttccctttgcaggttagattgcatgtggacgtgccatcattggtatgtgaggattgttacaagagggtcatagcagagtttatgaagcaagcaaaggtgctatggggttacacttatgctttatataattatataatgtaatgtctttcttatattctggctcaaagaaaatatatgcatcaaattattgttgtctgtgaatacggtgcactttattttgtctgtcaagaggattcccagtttctaaatttgaaactataactaaaacctctcattgaaaatttcggattactaaacctcacaatctcaagggatgtgctctatcctatcatatatgaatttacttgagattgtcatggatcccaggtttcagcatccaaagggctgcatgttatctttatgagctaatttacgattgttttaagtcaacagatccctggatttcgccctggaaagaaagttccagaaagcattcttattagttatgttgggagtgaaaatgttcagaaggctactattgaatctatattgaggaggacactctcacatgctatggcatcggtatgttacaatatagtttctattttcttattttttatgtccttatttttttctcttgatgttggttctttttacacttttggattcattgtgtttacttgcaattatatctgttaataattccctgatcttgaaattttacttcattattgaaagacaagcttattggttcatgacctttcctcattacctaagtctatttaacagtgctatctaatagtgcatttatttaaaatctgtgccactgaaatgcctttgatctgaggacttgatactgatcaacagattaaaaaaaatctttataatttcctgatcatttctccaaggttattactgaataaagtggattattagatcaagtattattctgatcttacactttagcatttcttaattaactttgtttataggttactggaagggctttgcaggactcagtacgaatagtgactaagttttctgagatggaggagacatattcttctcttgggtctcttaggtaatctataggttaagctttttgaaatatattttccattagagtcgttatttttctcttcctttgctgcatctgtaatactaaaactatattctgacataatatagagaaaaggaagactatcattaagaatgctaatattgtcagaatgtcagccaaagccaacgacttctacaggcagattatattaactattctcacttatttaacttctccaatctccagatatgatgtccttgttgatattgcaccagaaatcaaatggattcccgataataatgcatacaaaaatttaaagattgttgttgagatagatagtgatatagatgctcacagagcatctgaacaagaatttagaagacgttataaatccattggtgcactgaaagtggttactgacagagggctacaggtgactaaatttaatttataccagtctgctggcatacaaccatttgcttttttatttttatttttttaatatgattatttactagaaatgctattcatttgaaactctcatgaatcattttagtcataaaacttccaagttctttaaagcaagcacaaactatatagatttcatcatgtatgttttatatttagttgtgactgatacaatgaaggatatttactgattattttttatgttatctttactatctcatactaataaataactgtcatacagacacttttattatcttgataattaatatctgtattaataattttgactagtctacccaaaattggccagctgctacaatttttttgctgttcacaggttggagatgttgttgtccttgacatctcagcaacaaccattgatcaagatgaatcaaatgttaaaagtattccttctgctgaaagtaaaggttgggtgatgtgcttgaaggatgataataaactgataagcaatacaagtctttttctttttgtagtacatcatgaacatatttcctctaaatctatattggatatgcaggctttaattttgatacagaatatggtgaaaaagtattaccaggttttcttgattctataattggaattcaacaaggtgaatcaaagtcttttcctcttgtatttcctgaaacatggaagcaagaaaatcttcgaggtgttcatgctcagtttactgtaagtttctaatgctgaatcaaagaagtttaattgttttagggacatgatctgacatgatagttttttcttttggtcctttggataccaaattcttcataataaatactttttggccatatgtctcatgcaatttatggtgctttttcatctccttatgatagagttattgtctgtgatttataaaagagggggtaacactttcttttcttacattagtatgtttatggtcttagctttgttgctccatcagattttaataccagcttttatctttgcatttacctccaagaaagaggatgaaagcaagaaatgaagctttacctttcttgttcagcttgtgtagtcttagccccatcatacagtaaccgtgatctagctagaagtcttctagtgttttccatacatgatcctaaaatcaaaaatcaaatccctacagataaatataaaatgattgtgcaatgattcgagtagctgctgtattttattatgaaaaattctatttcttgtgatgatgcttttgcttggtaatataaaattaataataaagttataaatctttgtttgaatatctacttttctaatagtctagatgatcttgagagtttcatccagtctagtaatccctttcagttcataaaccagattgtgcatatctcagcgactataggttggttgaggaaaggaagtgaagttttcacctatcctgtatatttttagaagtctgtaggcagaatagctgcccctaggcaaaagactccaaaatcagtgattcattagatagagaagttgtgaaaagttcttggcatgaaactactcctctctagcttagcaccctttccctcaaacttgagaacaggcatctcagaaggaaagtttttgaactttcaggcaatgttgtctaaattgccttcttgctttccattggaggggatagtttatccctctgccaaaattaaactatattttctctcaataggaataggattcaaactctggattttctaaatagtgtacacagtgctcaactcattttcatgaatacaacattaggtgcatgtttggatctcatcatttccttttagcttgcttaaacacacctttggctgcatatataactgatcttgattattgtaaataccttttatgtataacaggttgaatgcaaagaacttttttacagagatttaccagagctggatgattctattgctgataagcttctccctggatgcaccacagtggagcaggtgacttttttacccttaaatacgattgtcaagtaaattaaggaattattttttagttgaatttagagtaaaattctctagcatgaatttccaggtcaaagacttgttgttacagaaatgtcaagaggtggagcaaacagctagagaacaagcaactgataatgctatcttagatcagatttctaaggtaacattacattaagtagatgtattggattgattttgtctcgtcttctagattagaacataccttgccacatgttttcaatatgcatgcttatacattgtgcataattatgtgcatctgacatggatacactagagttgttattatgattttctggtaggcatataatgattatcaaggacttccattttctgtaataagatgacaagacctacctttccttatgaacctcatggttgattttgaatcataacgtatcttgtaaatcatctatgtcatatcaagtatggtggtaagtatatccttcgaaaaaatctgattctgacatttatgaaacaagttacctttaaatttggattccctctctttggccctttcctacaaataattcttttaatgaattttatgctgcaagaaaacattggagtatgtaaattttatcactcaatatctgtgcatcttgtcattttcagatggtagaaattgatatacctcaatccttgtttgaggaacaaggaaggcagctttacggagccaacctattagaaatacaggtattggttgcaagttgcatcattttcaggccaatcaggcgacttagattccaaatttttacatttattcgtgatttaatgcaaaaaaagaaaaattaataataactcctctctcaggcaaaaatgaaactgaatgagcagcagctggcgactctgtcaagttcgaaggctgtgaacgaatttcttgagcatcagaaggaaaatataacaaatttgataaaacagagtctggcagttggtgatatatataggcgtgaaaatctgcaggtagcatgtttgattaagatacgtttccattctaaatatttgctcaggtcacgctgacaacaaaatctttcccacttataaaaagattacaagggtattagggccaccacaattctgtgattgagaaataatattttgctttgcacatatcacttgctttataaattataattaaactgcctaattggtgagtgttttttcttattggaatgatttgtgcatgtatgttttgtagtttgctactgaggaccttgtcaaagaggttgagaattccattgctgaattcaaacgtcaaaatcaagaatacgatgaggaacgggtgaagggacaggtttgtgccatacttctgagtttgttgactgttgtttattgttttggctgcttcattgtttcctatatgcatatacaacagtcaacaaactctctttcctaatttgtggcttgggccaaactctctttcctaattttgcgtattaattgatctgatctttttttactttcgtgaaggttcaagaaatactagaaggagctaaagtgcttgaatggttgagagaacatgcaaaggttcagtatataactaagtgagggatgagcactagccaaaacaaatcaggaaaatgaaattgcatgttcatttgaatgtgtgttgtttcagcggatgtaaattgtgagaaaatttcttgattgaattttgaagaaagaatattaagaatagaataatgcattacaagtttgtatattgagactttgatgataaattaatggtagataacactaataaaaagcagtattgaaaaacaccaatatatttctcaatacaaatctgctttaaagtgtcaatgttaagccctaaaggaaaagaaggaatgtcacttgcaaggatcgctacactctactgaacatagttccgcagctaaaaagaggtctaaaaagattgtttactaatctccaccacttgttccaacagggtcttcttctacaaataaaacaccaactgaagcattctctattaattgtatagtgaacttatcataaatgcctttcttgcaatatcttcccgagttttgtgtagagagatagctgctcctctgaaccaaggttcctcattatctacataaataaaacccttgagcgttacacctatgggtaatgaccataatgaaatgtatccagtttgatttatgtgtgtaatattggaactgaaagaaaacagaatcctctaatttttacatgaatgaaagttagccaataaattgcttaaactagagactcacctgatccaataacatctcaactgaatagtcttggcctacaacaaatgattgatggtaaatgtagacgaaaacagccattaccatctgcagaggatgcatcacagtataaaacacaacagtcacagactcacaatagctgcagagttatttgtgtactttatagcatggcatagaaagccgctcatgatttatggtgaaattgaaagcgctgagcattgaaacaaggtgtatatagcgagggcatataaaatttattagtgatgaatcaatttcactttaacatgtcaagacaatgggatatcttagctcatcgataacaaaacggtagatataaaacagagaaaatacccccaaatacttaaagcaagatcaatcatagcagttaccgattattgactaactataatgccataaaaaatttgaaaagtgtattctgaattaagtaatagcctattcagatataaaccaaggataattctagtacataaatatctatctatgagcaaacctggcagtccattctgtctgtaaatccaccatgtccaggtatactatcaccaaagtcctgtaatcattcaaagagatcaatgatattgctatgtttgggagtttcaaagtgaatggaaaaaggtgatggatgcaaaataaatgtctagtataaagagcaagaacatactttgattttaaaagctcttttgaagccactagcaaaaaaacctccaaatggtgctatgattgacgcaaatagtcccatccacaaggcatgccactgtactggcaaaactgctatctctttccatggaagctacaaaatgttgcaaaatgaaaaacttttagtcttaaattcttaatcttaagcttagtggcaaaaatgctatctctttgtaattattaggatagatttaattttttggtacttacccaatgagaaatcagtcctggcaatggaatgtaatctggcttaaaaattgggtcagggtcacactgaagccaaccagttgataaatcctgaatttatttcaccatcattaggaacagcataaatatttcctcatagatgactgcacccaatcaagattgttaccttccttggacatgttagccactggaagcgacccaagaagtttgcaaactgcacaaacataagtgacatcatcatgcaaagcaaaaatactgaaaaatatcattaaatcaactgaaagtggaggttgtgagttaaacacaaggtgtaaattttgaaagctttttgggatggtagttgatgtcagtcatgtcactaactgatgtttaccgtaaatgcagcaatcatagtggcaacagacgctccaatgaaaccttcccatgttttctttggagaaagcttgatcagaggtgttctcccaaaatagaaaccgaaaaaatatgcaccaacatcattcatagcaatgaggattgcagggaaaagaaaccttgcatgattatattaatatgttaggttgtaactagaaaaaataaaatcaattaaagcatgaaaaacatagtggttggcaataccaaagcagttactcttattagaacccagaatttccattgagtgaggatacatacagatggtagttttgcaggaaagtgaacctctttgggagcaaaaacaatagacatattgtaaatttcatgaatcatgatgccatgtttataaagagtcccgttatttgtgttcttttcttcctcttctttaataatgagaaacctttgtacaagtcaatcaaaccacaaatttaatagaaacatttttaatatttttgagcaacaacatagttaattcaaagaccactaaaattccacttattatatctgattatccttttactcatgtccataacaatatcaaagtcaacatataaaaaattgaacatatttttttcaatacattaaatgtatgcaaaaatataatttttccacaaccatacagtaagttggaatgtaaacaagaattagagaaaggcagnnnnnnnnnnnnnnnnnnnnnnnnnnnnnnnnnnnnnnnnnnnnnnnnnnnnnnnnnnnnnnnnnnnnnnnnnnnnnnnnnnnnnnnnnnnnnnnnnnnnnnnnnnnnnnnnnnnnnnnnnnnnnnnnnnnnnnnnnnnnnnnnnnnnnnnnnnnnnnnnnnnnnnnnnnnnnnnnnnnnnnnnnnnnnnnnnnnnnnnnnnnnnnnnnnnnnnnnnnnnnnnnnnnnnnnnnnnnnnnnnnnnnnnnnnnnnnnnnnnnnnnnnnnnnnnnnnnnnnnnnnnnnnnnnnnnnnnnnnnnnnnnnnnnnnnnnnnnnnnnnnnnnnnnnnnnnnnnnnnnnnnnnnnnnnnnnnnnnnnnnnatttcatcatcaagtaatataacagaagtcatgttaccagaatatccctgcaaatatgttggctacagtgaacgcagactgggtaaacacaacaataagtatcatatgtgtccatgcatactggccaaactgatacttgtaatatctcttcttcaatgaaagaataaaccatacaaaacctgaaatcacagatgaaatgacttattcaagaatgaaagattatttttttgaaattacaggcagcaaacacttgaacctgcagaagactaggttaacaggatattagataaaattaagttacgtaacaggattgattcagatttatgacgaacatgcccaacaaagacaggacctaaaggtatctttattataattattcatgttttctctcttaccaaatttggtgacaattatgaataacacatttggaagtactaacctgcaatatataaaaagtagcatataaccatctgatacttgatcaggttgctcacaaatctatacaagaatttatctgaagtcactgtattcacaagttgttgactgagaatacggccatatacgaatagcattgcggtgaagaaataatgcctggacattgcattcagaatcatatctttgtgaaactctatatattaaactaaacatttctcatatgcacataatcatttagaaattaccgtacatgaatgcttaccagttcaagagcttaaacttagggagacgtttatcttgagttgctcttctaagtagattgaagagctcactggccataaatatttggataaccacaaccatggcccagatgtaaagatgacccaagtatatgattagtgagacactcgctagcatccacagagatgagtatgcacggatccacattgatttgtatttggattcatcattgacaagcaaattgtttccatttgatttgcttatctctgcaggaatctgacacaaaaaccatcagtttcaaattctttaaaatgatttttttttcttcttctatttccccggcccattttctacagtatttgattaatgataaataatgtatacataagttaatgggaagttcatattcaaggatgacttcatcaactgcatgtaatgtatcttataagaaaaaaaaaatagcatttgaaatgccaaccaaatggatcaataataataagtaagctttggaaacatataaagctggattagattaggataccacaacagtaaagtcttatcccactaagtgaggtcggttacatggattacatgatgtaattcgaccaggttaaaaatcaaaattttataaatattattaagtttaagatctcttttgatgatttcctcnnnnnnnnnnnnnnnnnnnnnnnnnnnnnnnnnnnnnnnnnnnnnnnnnnnnnnnnnnnnnnnttctcggactaaatatcatgaaaaattcattcttctaactaacacctcttgtgaccttctttgtacatgccaaaccaccttaactgattttctatcatttttccccaatggatactaaatcaatcttctctcgtataacgtcattccgtattctatcttttcttatgtgaccatacatccatcttaatattctcatttttgctactttcatttttctctcatgtccctttaatacccaacattcactatcatatagtatagctggacatctaactatacgacaaaacttgcctttgagtttgataggtattttgcgatcacaaacaacctctgaaacttttctccatttaagccatctcgctaatgtaacatcctcattaatttcaccaccattttgtttgatagatcccaatatttaaaattagaaacctatggtatgacatcctctcccaattttacttctgagccaaaatcctcgtgtctcttgctaaaattgtagtgcatatgctttgtcttcctcctactaagtgaaaatcctttgtttccaaagtctacctcaagcttattgttaactgttttccttgattcttcaatcaagattatattatccacaaaaagcatgcaattagggataattttttgtatgtccttgataagcacatccaaaactatgttaaacaagaacttaaagctgagccgtgatataatcctaccccaataggaaagttcttggtttcatctcttggagttctcacactcgtaattatctcttcatacatgtcttgtatagctcagatataatatagataagaaataatgtgtagaggagtgaataataattttgtgcatattgtcataatcaaatggtttctgaattgacagaatctatagataactggtcttgcagcagcataaattcacaaaaaaacttgatatttgaaataaatgtatccccgatcacaaacaagcatacatgttattttactacaccaacctcatttgagcgtcttctttgtcgaacatttggcgttcttggtgaactacagttaatatcaacctcatttgagcgtcttctttgtcgaacatttggcgttcttggtgaactacagttagtatccgtatgtatatctctcattgttgaagtgatagttcaaatatttttggattgatatacatgcacggactgagacctcccctgagacattagaaggcaaaagttataaaagcaaacgacacatccctaataggattcatattaatgtatcaaaatggctgtatcctcaaaattcagcactcatactaaatatacataatcactttcataattgggaaagttaaatacacaacaatatagtataataagcaatgaaattagtggacactaggtacaaaatgatattgatgatgtatgtatgcatgcgtccgtcaaacaaaaaatttaacaaattgtgacctattagtttgtgcctcgatggttgattcaaggttttttgaaacaataagcatgtgcccaacatatagttattaaagttacataaaaatagatcattgattgtcacacactcacaaaatcgaaacccttttttcttgtaaggcacaagtttcatgtgctcaaaacagaaatgggataatgattctaacaacgaaataatggaaactatatatacaagaaaaaagaaataacaatggagaatggagaagcagattgaaatttaagagtacatacttggatttaagatgtaaaaaatgacaaaaggatcaatacgaattgagaaatttttttatgatgttagatgtggctttgctatgtttcagggaaacgagaattaacagcacaagacatagtaggannnnnnnnnnnnnnnnnnnnnnnnnnnnnnnnnnnnnnnnnnnnnnnnnnnnnnnnnnnnnnnnnnnnnnnnnnnnnnnnnnnnnnnnnnnnnnnnnnnnnnnnnnnnnnnnnnnnnnnnnnnnnnnnnnnnnnnnnnnnnnnnnnnnnnnnnnnnnnnnnnnnnnnnnnnnnnnnnnnnnnnnnnnnnnnnnnnnnnnnnnnnnnnnnnnnnnnnnnnnnnnnnnnnnnnnnnnnnnnnnnnnnnnnnnnnnnnnnnnnnnnnnnnnnnnnnnnnnnnnnnnnnnnnnnnnnnnnnnnnnnnnnnnnnnnnnnnnnnnnnnnnnnnnnnnnnnnnnnnnnnnnnnnnnnnnnnnnnnnnnnnnnnnnnnnnnnnnnnnnnnnnnnnnnnnnnnnnnnnnnnnnnnnnnnnnnnnnnnnnnnnnnnnnnnnnnnnnnnnnnnnnnnnnnnnnnnnnnnnnnnnnnnnnnnnnnnnnnnnnnnnnnnnnnnnnnnnnnnnnnnnnnnnnnnnnnnnnnnnnnnnnnnnnnnnnnnnnnnnnnnnnnnnnnnnnnnnnnnnnnnnnnnnnnnnnnnnnnnnnnnnnnnnnnnnnnnnnnnnnnnnnnnnnnnnnnnnnnnnnnnnnnnnnnnnnnnnnnnnnnnnnnnnnnnnnnnnnnnnnnnnnnnnnnnnnnnnnnnnnnnnnnnnnnnnnnnnnnnnnnnnnnnnnnnnnnnnnnnnnnnnnnnnnnnnnnnnnnnnnnnnnnnnnnnnnnnnnnnnnnnnnnnnnnnnnnnnnnnnnnnnnnnnnnnnnnnnnnnnnnnnnnnnnnnnnnnnnnnnnnnnnnnnnnnnnnnnnnnnnnnnnnnnnnnnnnnnnnnnnnnnnnnnnnnnnnnnnnnnnnnnnnnnnnnnnnnnnnnnnnnnnnnnnnnnnnnnnnnnnnnnnnnnnnnnnnnnnnnnnnnnnnnnnnnnnnnnnnnnnnnnnnnnnnnnnnnnnnnnnnaaatttaatattataatatattatacaaatgaaatattaatcataatttaatatttttgtgttttatttaaaataaaataagtaatagtattaatcatactacaattaatgacatgaatattactatactttatgatacatgattaatatgtagcacaaacttcttattatattcagttcataattcgtagttcagattttcacaaatttttatctgttaaaaatttaatatattttatagtattgtcctcaatatatttcatacataacatgcatatatttaatttagattttaatttaaaaatatataattaaaaatttaatttcagaaaatcgtcgtctatcaaatatataattaacttatatctattatgaacaacaaaaattaataattaaaatattatactttaatcgttaataattcttcatacaaaataaaaaatatttaaaatattnnnnnnnnnnnnnnnnnnnnnnnnnnnnnnnnnnnnnnnnnnnnnnnnnnnnnnnnnnnnnnnnnnnnnnnnnnnnnnnnnnnnnnnnnnnnnnnnnnnnnnnnnnnnnnnnnnnnnnnnnnnnnnnnnnnnnnnnnnnnnnnnnnnnnnnnnnnnnnnnnnnnnnnnnnnnnnnnnnnnnnnnnnnnnnnnnnnnnnnnnnnnnnnnnnnnnnnnnnnnnnnnnnnnnnnnnnnnnnnnnnnnnnnnnnnnnnnnnnnnnnnnnnnnnnnnnnnnnnnnnnnnnnnnnnnnnnnnnnnnnnnnnnnnnnnnnnnnnnnnnnnnnnnnnnnnnnnnnnnnnnnnnnnnnnnnnnnnnnnnnnnnnnnnnnnnnnnnnnnnnnnnnnnnnnnnnnnnnnnnnnnnnnnnnnnnnnnnnnnnnnnnnnnnnnnnnnnnnnnnnnnnnnnnnnnnnnnnnnnnnnnnnnnnnnnnnnnnnnnnnnnnnnnnnnnnnnnnnnnnnnnnnnnnnnnnnnnnnnnnnnnnnnnnnnnnnnnnnnnnnnnnnnnnnnnnnnnnnnnnnnnnnnnnnnnnnnnnnnnnnnnnnnnnnnnnnnnnnnnnnnnnnnnnnnnnnnnnnnnnnnnnnnnnnnnnnnnnnnnnnnnnnnnnnnnnnnnnnnnnnnnnnnnnnnnnnnnnnnnnnnnnnnnnnnnnnnnnnnnnnnnnnnnnnnnnnnnnnnnnnnnnnnnnnnnnnnnnnnnnnnnnnnnnnnnnnnnnnnnnnnnnnnnnnnnnnnnnnnnnnnnnnnnnnnnnnnnnnnnnnnnnnnnnnnnnnnnnnnnnnnnnnnnnnnnnnnnnnnnnnnnnnnnnnnnnnnnnnnnnnnnnnnnnnnnnnnnnnnnnnnnnnnnnnnnnnnnnnnnnnnnnnnnnnnnnnnnnnnnnnnnnnnnnnnnnnnnnnnnnnnnnnnnnnnnnnnatcaaattgaatttattttaaataataaaggacctaaataatttaaaaaaaaagatttaattgaatcatttccaaaaattagaggatcaaaacctaaaatttaaaaataagtaataaaataaaaaagccctaactaatcaaaagttctattaaactataattagaacgaacattaattccattccgttggcgtaacaacaattgtggcaaaccaaagaattgggtccacgatgacaatatatttaatcatcaaggaagtaggtataattcgacaagaaagaaagtaggtatgatacgagagagaacagaacagggcttacaaagatttgtgcctataataaaatacaatcacatgagagatgatgccattataattaaaccacactgtttaattttagctaagatggccactttggtcgatgattagcaaataattgaaaatacaaatgcatgtgactgcgttagaaattgtgctttgggctggtcaaatgcaactatgcaaattctcaagttccagatcttattatattaattccctgcgtaggtcacatgttgcatggccccaacccacatgtgtcttccattgttggcatcttgattattgattttcggacagaacataacgtgtgttggaaaaaatctaaacccaccatgtattgagcaacaagcatgaaattgtgctatctaaagaatagtagtagataagtacaaaaaacacagagttgttaggtggagggaggggaacgaacttagagtgtcatggtcccctcaagcttttaattctctttggaattactttgttcttactagtatatacttcacttccacaaaagaattctataaaatttacatttagtctcttctcttagttataaaatatatttattcatattttattctagataaagcacaactttaccaattactaaagcataaaataattcattcttaaataaagtaaatataaaattagaaaattcaatattcataatcaaatcttacgagtttacaaaaaggaaggaaacttttcataccaaacaaatttggatttcatatttactttgaactaatttgctggtattttaattgagtaatataatgtctttgccgttaatagaatagtaaagatcagtagttgtttcacaacaaagttatatattactgggtttaattttggttttgctttgaatgatggtattttataattgtttgaaattaatgaagttaagcgatggagtttgacttcagtaaagaggtttaaccattaatttaattagctatttataaattatatggtaacactactagaaaaatgcaatttagctttattataaattataaccatggataacagctgaataataatttatttattttgctttattatatttagatgaccattgttggtaacattcgtgctaataagtgataacccaggtagtgtaagtcgtctatttgggaaatggaagacgacttttcccacttaagtttttattttttgcttttctaattgtacagcgccattagaatttagaactattaggtcataaacaccttaaaataaatatagtaaaatacatggtctaaatagaaacttttggcgacaggtaaataaaataccacacccttaattcataacatatcagaataaaatgataatgattcttaaccagaaaattatcgtagacctcagaaaatttaaaccgggtattgtatagagaaaaaaagagaattggtgaaaaagggaaaaataaataatgatagatttgtataaaacatgtaaggaaatatgtttgtaacaccatctaaaatattgtaattacgatagagttgtctaacttggaacaaattaaaataatacctcacaagatttcatnnnnnnnnnnnnnnnnnnnnnnnnnnnnnnnnnnnnnnnnnnnnnnnnnnnnnnnnnnnnnnnnnnnnnnnnnnnnnnnnnnnnnnnnnnnnnnnnnnnnnnnnnnnnnnnnnnnnnnnnnnnnnnnnnnnnnnnnnnnnnnnnnnnnnnnnnnnnnnnnnnnnnnnnnnnnnnnnnnnnnnnnnnnnnnnnnnnnnnnnnnnnnnnnnnnnnnnnnnnnnnnnnnnnnnnnnnnnnnnnnnnnnnnnnnnnnnnnnnnnnnnnnnnnnnnnnnnnnnnnnnnnnnnnnnnnnnnnnnnnnnnnnnnnnnnnnnnnnnnnnnnnnnnnnnnnnnnnnnnnnnnnnnnnnnnnnnnnnnnnnnnnnnnnnnnnnnnnnnnnnnnnnnnnnnnnnnnnnnnnnnnnnnnnnnnnnnnnnnnnnnnnnnnnnnnnnnnnnnnnnnnnnnnnnnnnnnnnnnnnnnnnnnnnnnnnnnnnnnnnnnnnnnnnnnnnnnnnnnnnnnnnnnnnnnnnnnnnnnnnnnnnnnnnnnnnnnnnnnnnnnnnnnnnnnnnnnnnnnnnnnnnnnnnnnnnnnnnnnnnnnnnnnnnnnnnnnnnnnnnnnnnnnnnnnnnnnnnnnnnnnnnnnnnnnnnnnnnnnnnnnnnnnnnnnnnnnnnnnnnnnnnnnnnnnnnnnnnnnnnnnnnnnnnnnnnnnnnnnnnnnnnnnnnnnnnnnnnnnnnnnnnnnnnnnnnnnnnnnnnnnnnnnnnnnnnnnnnnnnnnnnnnnnnnnnnnnnnnnnnnnnnnnnnnnnnnnnnnnnnnnnnnnnnnnnnnnnnnnnnnnnnnnnnnnnnnnnnnnnnnnnnnnnnnnnnnnnnnnnnnnnnnnnnnnnnnnnnnnnnnnnnnnnnnnnnnnnnnnnnnnnnnnnnnnnnnnnnnnnnnnnnnnnnnnnnnnnnnnnnnnnnnnnnnnnnnnnnnnnnnnnnnnnnnnnnnnnnnnnnnnnnnnnnnnnnnnnnnnnnnnnnnnnnnnnnnnnnnnnnnnnnnnnnnnnnnnnnnnnnnnnnnnnnnnnnnnnnnnnnnnnnnnnnnnnnnnnnnnnnnnnnnnnnnnnnnnnnnnnnnnnnnnnnnnnnnnnnnnnnnnnnnnnnnnnnnnnnnnnnnnnnnnnnnnnnnnnnnnnnnnnnnnnnnnnnnnnnnnnnnnnnnnnnnnnnnnnnnnnnnnnnnnnnnnnnnnnnnnnnnnnnnnnnnnnnnnnnnnnnnnnnnnnnnnnnnnnnnnnnnnnnnnnnnnnnnnnnnnnnnnnnnnnnnnnnnnnnnnnnnnnnnnnnnnnnnnnnnnnnnnnnnnnnnnnnnnnnnnnnnnnnnnnnnnnnnnnnnnnnnnnnnnnnnnnnnnnnnnnnnnnnnnnnnnnnnnnnnnnnnnnnnnnnnnnnnnnnnnnnnnnnnnnnnnnnnnnntactctctcatctacttattcacacagttggtcaaattaaaaagcttacggcttacctcagttatgtacttgatgatcatgtaaccaatttttaatttcatgattgccacatcgaaaaagcatagtattattattgatatacaagcaataatttgtttttctactctataaatgaaatgagatttgaaagccactctgtctctgccctttcattttgtcttaaattaaaaggaagaaaataaaagaaactatacaagtggaaaaaatgatggacgaagtgtgatgtctctaccattatgcatgcataaatgaatcattgcctgatttttatttttagcttttcatttagttagttttttataactttaatttagttagtttgattacatacatatatgaaatagcgttagatctacggagtattcattgataaaattattttttattaaagaatttaaccgatcatttttagtaaaaaaaattcttttaattatgttatttttgattgatcatttttaataatttttttcttcttttaattatattatttcattcacaaaattcaaacataagatcttacttaataaaattaagttcaatatcattttaatcaatgatttattaatatcattaaatacgcttattatcaaaccagttaataatacaccgattcatgttttaaaccatccaattaattggtaaattcgaattttacaccaggggtagtagttttggggtcatatcatatgcacttcatgcaatgatagatacataatatattgctgaataaattaaaaggcctgaaacgtaggccatcccaaatgcagaaattatatttatatgtagggatatagaggctatcccgcgcatgatgataaaattataattattctcataatggatggcttacgtagaataatgagaatgcaagttatggtccaaggaaagtgatgaaatgaaaatgttgtcacattgcagaagggttatatattatacactaaacagaaatataggtagcttcacattgatgctgtcattactcatttggacagagacgtgttggattcgtgatgacaaccctatccctgaccgcgacctttgcctttgcccatgtatggagttttcctatcctctgctttttttcaggttaaataattattcacaattttcttttatagaaaaagggtatcattcccccatttgttgctagcaattgcccctgcccttaagttttataacgatattggcctttattgcactcctggacgtatactagcctgcaattccacgttcttatcctttgactacccattctcacacatccaacatatggtttcaaaatccctaataaaaaaaagcacatggtttcaaaacaaaataataaatcattattgcaggtagagtatcatagaagattgagtctagtgagggagatagtctttcataaaatgattaatcaatgtttgaattttttttaaaaatatttataattaatatttgatcatatctcggacataattaactatatacactttcacggtttctaatttaattgtttgcaaatttttttatcaattccattatgttttctatggttttctaactatttgcttgcttttgatagtaatttttacaagcatttcatattatttttgcattttattttctttcttttttaatgagacccacgtaaattgaatagtagctcaatgcttaccccagaactggtgctgtgacatgagcatggcgcaatacttagttgccttgtaatgtgataaaatgggaatttgaggtgctcattaattgcttttccgtaaacaacttacctgtacttagaagtgaatgatggattcttttggtaatgtgtttaggtggatggaaataaacgatttctctcttgtttaagcctgtgtttgtttttctgttgggaatatcccaaacagacgttttcctaactttagaaatagaaatactttcttctcacaaaacagaatatgagaggccgcactttttgactttagccgatatatgcaaatacacacctagattttggcagttattagaagttagtatgttattaatatgaaaaaatattaaaagatagtagtaataaatttagaaaggttatttacttgatgcattggttaaaaaattaaaaactaagtttttattaaaattaaaatacacaaaaatgtattgtttatgattttttttatatttttcaatggtttttacaaataaatattctcttcttttaattttttaaacaatgtcataaaaatactgattaataagaccctaataaattatagtaagataataattataaataacaataatagtaattaaaattaaattaaaatacattgatagtgtaaatttttaaacattgtctttcaatcatcacatattattatgctgctttgatcttcagaactactgtagaggagtggagctcgcttagaataaaggcgtaacaattgttgaatgcgaatcatactcacttgtggctttggatcttattaatcatgatcagcctccttggcattcgtatgctgctttgataaactctattcaatgtttcaagaatagactttgggtcctaagtttttatggtaacatttgaaaaaaatgaagagtgagggagactttagacacagtgtcatgatcgtaaataagggggaagagttggggcaagaaacgaattgacttggaactagacaagggaagagatagatcatagatagtcattgtgggtccattttgttttcatacactaacactgtactctgtcttttgcatcatctaagttcgttctaataaatcgcatcatctaatcttattcttatgaccccattattatatgcacactctacacaacacaacctcactctctctttctctctctttcacgaactcactcgctcacgctctgtttcagatctgaagccacataaccctaaccttcaaacggtacgcattcttctctccagcgacttcttcttcttcttcttaaggtctgatctccgcatcccccaagatctgcttcttcctcgttgctctgtgaatgcaagtgagctccgtctcaacttcttgttctacgctgcgtttctttctttctttcgtctattcttttcaagcttcgttcttttctttagcttgacggtgaacatttccctctcttttttctcgatcatcgcattttcttgctacttgttgctgatcattgggttattatagcttccgtttcttcgtcgactcatttcattctgttgtgatcgttagcttaattagcttacctctgcatgatcatgtcatatgtaatgaacaaaatccgacttctttacagatgcaattaaaaaactttttactttttaacaataattaattaattattatttttattaatattaaggaatttctttttttggcttatctcttcaaagatccttatttgaattcgttagtttagttgttgggatgggtaattttgggttaccggaattcaacatttacccacgatggattacggctttgcatttaattatgctttaattgcatttgcattgtcttatagcagatgtcttctactttcttgatcttcatggaagagaagaaatgtttctctatgcgtttggtggaagcagaaagaattttcatgtcatttttatattttgaggtgcaggctaggtgtcgctgggacttcaatggcagtgaccgaagctcaaaatcctcttcttggagaaaacacatgtggttccttgttaaaaaagcttcaggtaactaacttcattcaactgttcatctgtgtcacttaagatgcgaatgctctacagaataatgggattaagtaattacattttctttattcgctgtaggaaatatgggatgaggttggtgagagcgacgagcaacgagacaagatgcttcttcagttagagcaggagtgcttggatgtgtataagagaaaggttgagcaggctgccaagtcaagggcgcagctacttcaagctctgtctgatgctaagcttgagctttccactcttctatcagcacttggagaaaagagcattgctggaattgttagtaactacttgactatgtcttatattgttagtaaagtggcaaactaatttcctatgcatattttttattctttcacagcctgagaatacttctggaactatcaaagaacagcttgcagctatagcaccagtacttgaacagttatggcaacaaaaggaagaaagaattaaggagttctgggatgtacagtcacagatccaacaaatatgtggagagatagccggaaacttgaaccttaatgatgtttcacctgcagttgatgagtctgacctgtccctgaagaagttagatgaatatcaatctgagctccaagaacttcaaaaggaaaaggtaattctgttataatgttcaataatgtgtcagttcagtttgtcactaatttggaaaattccatttgatttcattcactaaacagctcattgagagttttgttgcattgccttgtttggcagagcgagaggttgcacaaggttcttgaatttgtgagtactgtgcatgatctatgtgctgtccttggtatggacttcttcagtactgtaactgaggttcatccaagtctaaatgactctactggtgttcaatcgaagagcataagtaatgacaccctagcaaggctggctaagactgtcttaacgctgaaagaagataaaaaacagaggctgcacaaggtaatgcatttagaacatttcttccccttaatttttatttatgcaatagcttttaactgtataagctctcaaatgttaggatttttgatatactgtagtttttgtcttgctaatcgtgtgtatgttttcaagaaatcaccatcaattctgactttgacaccccagagtgatattacctacaaaatgttttgcattcattacttgcttgacttttaatctaataccattttctttactttgacctggatatttcatgcagctccaagaattagcttctcagttgattgatctttggaatctaatggatactcatcccgaggaaaggagactatttgaccatgttacctgtaatatgtcagcttctgttgatgaagtcactgttcctggtgcccttgctctggatctgattgagcaggtactaaagaacttctgaagtttacggattcgagctccaagtatgttatattaacttttttttgtttaataataaaggctgaagtggaagttgagagacttgatcagctgaaagccagcaggatgaaggaaattgctttcaagaagcaagcagagctcgaagagatatttgcccgtgctcatatagaagtagatccagatgctgcccgggagaagattatggcaatgattgattcaggaaacattgaaccaactgaattactggctgacatggacaatcagatagcaaaagcaaaagaagaagctttaagccgaaaagatatattggacaaggttgagaaatggatgtcagcatgtgaagaagagagttggcttgaagactataaccgggtacttaaaatcttgcttctgctttatttctctttctgagtttgaatgattggttttgcacagccgtggatagagaggtgaagtagtagtattataatcagaacatttactatcatgttaacaaaaattgtaaatcctttaaccagagttaatctgtatccgtctttgttatatagtctgctagttttcagtttaagtgatttgttgtttgacaagataattgaaatgtttcttgctctgtttccagaaatatttagatttttagcattagctttgctgcaagttatgatctttaaatggttgcctaatcctcctcatttggattataatgttacactctgacacaaccttgtaaaacaggatgagaacaggtataatgcaagcagaggtgcacacataaacctcaaacgtgcagagaaagctcggatattggtcaacaaaattccaggtatttgttaaatgagattacaatcaccatcagatactgttattattaattcaatctgctgtcagtgtaagcaaaacaagatgatgccacattattggaataattttgtttctgttggtgaaaatgcagctttggttgatacattggttgctaaaactcgtgcatgggaagaagatcatggcatgtcatttacatatgatggcgttcctcttcttgccatgttagatgaatatgccatgctcagacatgaacgggaagaggaaaaacggaggatgagggtaattttcactaatgagatgattaggattactcattttcagcttgatttgagcaattgctaataataataagaccacaactctgcgaggaaattaaaactatcagcttggcctatttctgttctgttcactactattctatatttgtcatacataatgtggtacggagaggtcataacatatggactttgcactttgtaggatcagaaaaagcatcacgagcagcgaaacacagaacaagaaaccatctttggttcaagacccagccctgctaggccagttagttccagtaagtcaggaggtcctcgtgctaacggaggagccaatggtactcctaaccgacggttatcgcttaatactcatcaaaatggaaacaggtccacatcaaaagatggaaaaagggaaaacagactatctgctcccgtgaattatgtggccatgtcaaaagaagatgctgcttcccatgtttctggtactgaacccatcccggcatcaccctaataatgagatcttcattttcaaccctataatttcatctttgtagcattgtcaaattactagtgctttaggaattataatatgggagtgacaagtaattagagaggaactgttctgagctgtgtatgttcaatttgccatttggaggttttctcaatagatatgccctataatatgaaaatatacagtcttcagtgctagtcttgcctttttccaaaccctagcttctattcattggtttgtttcactttccgtgtgtttgaaatggtgttacatactcttaaaaaaatgatgttacatatgcacgtctaccctgcaatttcacgtcaaagaatggaaaaaatgcagaagcaacaaatagttactcacgctgtccggctttatgctgtcaaatgcaaatttccgaacacacattttctccttgtgagatgtttcagttttcagcatcatctccatggcaattggattttcataaatatttaactcacggtgcaagcaataaaatggtccaaatcgcgtagtatttttcaagcatggggtaggggtattattaatcaaatgttacttattattcaaattgtataaaattaattaactacaaaaatgaaaagggtataaagggttttttcttttagaaattccatgtatctttcatatgtgacatgtgacaatttggctcgagattgatagaattactatgaagaataaaattctttaattgagtattaaatggggaaatactaatgattcaaactcaagatcggttgttaatatgagacaattttgcactagttaaaccagtggtgagatttggttatttagagttttgagtgatatgcaaagttcaattgacgatacaaaataatctttataacaataattatttttgcttacctgcttaatgcattgaaaatggtagggttgatactaagatacttatatctgcattcttatccgtcaaaatttgttcgtattgcttgtatctaaatcctaaataccattctcgttaagtgggtaattacttaccaatcaagagtaatttttgcactacccattgggaatcatcaacatattagtggtatttgaacttattttacttatactttaaaacctctaaaacatttaataacagtttagtttgtatgaatgnnnnnnnnnnnnnnnnnnnnnnnnnnnnnnnnnnnnnnnnnnnnnnnnnnnnnnnnnnnnnnnnnnnnnnnnnnnnnnnnnnnnnnnnnnnnnnnnnnnnnnnnnnnnnnnnnnnnnnnnnnnnnnnnnnnnnnnnnnnnnnnnnnnnnnnnnnnnnnnnnnnnnnnnnnnnnnnnnnnnnnnnnnnnnnnnnnnnnnnnnnnnnnnnnnnnnnnnnnnnnnnnnnnnnnnnnnnnnnnnnnnnnnnnnnnnnnnnnnnnnnnnnnnnnnnnnnnnnnnnnnnnnnnnnnnnnnnnnnnnnnnnnnnnnnnnnnnnnnnnnnnnnnnnnnnnnnnnnnnnnnnnnnnnnnnnnnnnnnnnnnnnnnnnnnnnnnnnnnnnnnnnnnnnnnnnnnnnnnnnnnnnnnnnnnnnnnnnnnnnnnnnnnnnnnnnnnnnnnnnnnnnnnnnnnnnnnnnnnnnnnnnnnnnnnnnnnnnnnnnnnnnnnnnnnnnnnnnnnnnnnnnnnnnnnnnnnnnnnnnnnnnnnnnnnnnnnnnnnnnnnnnnnnnnnnnnnnnnnnnnnnnnnnnnnnnnnnnnnnnnnnnnnnnnnnnnnnnnnnnnnnnnnnnnnnnnnnnnnnnnnnnnnnnnnnnnnnnnnnnnnnnnnnnnnnnnnnnnnnnnnnnnnnnnngtatagagactaaaataaagtttaactaaatacggtgattaaaatatatgtttctcatttttattattattgaaaaagtaaaaaaaaccttttcagacatgtcaatgataaaataataatataatttttatattgttaatgcataaattattttaatatttcctcttaatactaactcctaaataatccaattaaacctttaatagtaaaatgttcttgtcctctctagccccctaagtttatttattgagttccatgcatttgtatttgaagaagagaaaatttcaatttttcatctatttttctcatattctagtagttaagcatatagtaaatgaagatctaattacttgaagaataatgctataacattctctctcacacatttttttttaggattctttctataatttgttagaatgtattagaaattaccatttttaataggttttacttatcatttaattattttctcttctaatttatattaaatgagtaacaaaatttattaaaattaataatttttaataaattctaaccaatcatattgagaattttgatggagaatatcaaagaaaatgtgtagcattccctcttaactgaattcatgaaattaaattgtatgcttctaaaagtatgatcttgcaaatgactaaattgataatttaaaataaaaaataggacgaacatatgaattgattacttttaaatataacataatatattaatttataatatcttattcagttttaaattatcacagcaatttttttttcttagctgagaagtttttttttttttttcttaatagttgctttggcagggaaagacggtcgaaggcataagtttggaataaagccaacaaacgacgtcgtgtggtttccaataccttctgcgttttgaatttttgcgagaattgagatggcgaacgagaacgaacccgcgaagctgctgttaccataccttcaacgcgctgatgaattgcaaaagcacgaaccactcgtcgcttattactgtaattctctcttttatttttattttagatcgatacctatttttcattattgcaatttttgttgtttcactcatctgaaatactctaatcgttgttataaattatcacgatgaaatgtttttttggtaaaattaggtcgattatatgctatggaacgggggctgaagattccgcaaagtgagcgcacgaagaccactaatgctcttctggtttccctcatgaagcagcttgaaaaggttctaaagtaaaccgtgttgtttttttgtgctgattgtaatcacaattaactgaaactcaaaggtgatccaacaaataaatataaaagtgatttttaattaatctcgtggatccctaactttgtgttgttttttaaaataagaagggaatctactcatgttaaatggaagtgtctgaatctgaataataatgaattaatgatactatggcatgtttcagtggcaatctgcagttttctttcctttgaaagatgttagtggttgacatgtttgattgggtatgattatggaatttttatttactcaattgatgtatccgaaatatgttgtttttacaggataaaaagtcaatccagttggggcctgaagacaatttatatctcgagggatttgcttcgaatgtgtttggaaaagcagacaagcaagatcgtgccggaagagcagatttgtataataaaatcactctttttttttttaatgctagcttgaaataaataaataagcctttaagcttgtatgttggttctgttgcatcagctgtgatccttatggtctcagtaaagtttacaagggatttttgtatcttcttgtttctttgtcttgaacaagatagtagctcactctctttacataccaagtatctgtcttttgccaaacatttgctatattccctttgcataactatcttgcttgtaagaatttttcatctgtgataagtttttaacgtatattctttgacactttgcaggaatacagcgaaaacattttatgctgccagcatcttttttgagattcttaatcaatttggagcagttcagcctgatgtgtgtatttcatgcattgaattgaaccttccttttttatgcatgtctcattgcatttggatgttttccacaaagcctttcttatttggaaacaatttgcagcaagaatacaacttcctgtaactgtatgtttaatgcttttttgagtttcttttacagctggagcagaaacagaaatatgcagtgtggaaagcagctgaaataagaaaagctttgaaagaaggaaggaagcccactgctggcccccctgatggtgatgaggacctctcagttcctttgagttcttcaagtgatagatatgtatgattcaaaacttcacctggtgtcttctgggtttgatcagtttgaaaaacatataaataaattcattaataaatataaacaattaacattgagctgtttattcttgcaggaccttgggactaccgaaactactgtttccagtcctggaccagaatctgattcagcacgtagttatcatagccctgtcaactaccagaatctgccaagcattcatcctgctcctaaatttcatgatactgttaacgaccaacattctgcaaatattccaccatctatgccttttcaggacagagtagataataacaagcattcttccattgtttctccatcatctcactcttacacacctggagtttatccttcccaagattaccatcctcccccaccttcccaagattatcattctcctccaccttcccaagactatcattctcctccgccttcccaagactatcatcctcctccaccttcccaagactatcatcctcctccaccttcccaagattaccatcctccacctgccagatcagaaagttcttatcctgagccctacaaccatcagcaatactcaccagagaattcacagcatttaggtcctaattacccttctcatgaaacttcctctttttcttatccccattttcagtcttatccaagttttacagaaagcagccttccctctgtcccatcaaattatacttattatcaagggtcagatgcttcatattcttcccagtcggctccgctaactacaaaccattcatcaagtgctcaacacagttccagcagcagaaatggaactgttgtggaacctaagtcaactactcagacataccagtatgacagtaactaccagccagcacctgaaaaaatagcagaagcacacaaggctgcaagatttgctgttggggcactggcatttgatgatgtctcaattgcagtagactacttgaagaaatcccttgagttgttgacaaatccatcagctggccagtaagatgttatgtaaatcgaaatgtggatttcaatggtttttctacctattatttgcatgtcttgttttgtatattacatacatcatgcatttaaagtgtgaagaaatttggggaagatgaatggaaatcataaaatctgctgggactgcaatctttcttgtttatctggtagttattgagattggcttgtttgtcaaggaattgtgatacatataagagatgtctgcttgatgaatttcagttctgtctgggacaattctctttttctttttttgtttgggtcttgcactcaaattcaggtttgcgatcatttacccattgaccctgaggatttgaatctcagttatgaaattccttagtacatcataattacttgttgcttaagttccatttcagagattagtacaatttggtttggcataaaaatctattacatttttaatgatttttttagaagatagtgatgagttttggcagctgtatagccgggccacattatattgacggaaattgtcagatgaaaactaaattggaataagtttggtaggtttaaccatattatacttaaactcccgtttcctttcaagcaaggagccggagtgtggattaagttagggtatttgggttatcatctgaaaagatccaacagttgaatcttcctatggctatgccaagaaatgttattctgatctattttaacttttaacctaccgtgattgtgtcgtcactggtacattgccagatacttgacaagaaaccaaaaaaccatcttatccttcgaactccgatatcagtcacagtgagccttcaacgcttgatcatcttattgaaccatttaaacaaacagatccatagaatgattccacaccttaacttgaatctaccatattacataacttttttacccttgacatttctgctggggaacattgcttagaaactgttgtgtctggacctgcaaaagaaagctgcagcaaacctaacagagaaacaagtaaccctttttatggtccttaaagcgtagttgccttgcattacatgaggatcttttttttttttgccatactggaatgaaaagatttttgcctctgggaagtccatccagttatcggacaactatgctactgcttgtacgagaaaataggcgcacgaagcataagatctatgttgcagtgtttttaaaaataaatgttgattaaaataacagcgatgctatacagtgcgatttttttttttttactacgaatctacttgtttaaatataattggataaatattgaatttaaaaaataaaaataaaaactaggcttttgactcaattcaggagtagatagttattgtatagataatccgtgcggtacgaattcgcacaaatggtattttccttaaaataattaaaaaatataaagaaaaattaggcagaaaacacctttcgtgtgtttgttacgaaatctattcgtaacatttagtattggtcttcaatacaagtggaaaagggccacaaaagcccaagagaaaaagcagtggtccaacggtatagaaatgaaaagcaatctcacctcacattgtttttctttttgggtcttttccactctgaggatgataccgtcatttacctcttctgtatggtacatgttgggctttgattattgtttagcgaaaaatgtatattttttaaaaacaaatctccatgaaaaatttaattataagtaatttttgaacacggtaaaatgcaagtctgaattttcatgactcctctaaaatgagtaggggaaaagtaagtaatttcagttgttaataagaaatttcgcagttgatatttcaacgcatttaatttgttatgcgtgcaccataaacataatattaacaattgacttttttcttttttttnnnnnnnnnnnnnnnnnnnnnnnnnnnnnnnnnnnnnnnnnnnnnnnnnnnnnnnnnnnnnnnnnnnnnnnnnnnnnnnnnnnnnnnnnnnnnnnnnnnnnnnnnnnnnnnnnnnnnnnnnnnnnnnnnnnnnnnnnnnnnnnnnnnnnnnnnnnnnnnnnnnnnnnnnnnnnnnnnnnnnnnnnnnnnnnnnnnnnnnnnnnnnnnnnnnnnnnnnnnnnnnnnnnnnnnnnnnnnnnnnnnnnnnnnnnnnnnnnnnnnnnnnnnnnnnnnnnnnnnnnnnnnnnnnnnnnnnnnnnnnnnnnnnnnnnnnnnnnnnnnnnnnnnnnnnnnnnnnnnnnnnnnnnnnnnnnnnnnnnnnnnnnnnnnnnnnnnnnnnnnnnnnnnnnnnnnnnnnnnnnnnnnnnnnnnnnnnnnnnnnnnnnnnnnnnnnnnnnnnnnnnnnnnnnnnnnnnnnnnnnnnnnnnnnnnnnnnnnnnnnnnnnnnnnnnnnnnnnnnnnnnnnnnnnnnnnnnnnnnnnnnnnnnnnnnnnnnnnnnnnnnnnnnnnnnnnnnnnnnnnnnnnnnntttttatcaacgaccgatattactttatcttctaaggtgagttgtttactttaaaagagacaaatccaaagctccaaggacgagttatcttaattttaagtattatcaaaatctgtatagctgattcaatgtttattagggggaaaaattgagagccacaccctttatgttgaatctgttacctgtccaaaccatccaattgatagttaatttgaactacattaccaataaagtaatatgttgcttgtccttcaattaatgaattttagttaaaaggtactttcttggtcgattcatgtgatatggcataggaacaactttatctgctcgttgtgatgatagaggaacagttgaacacaaagcgatcatataattggagtctcaggcttttgcttcactatttgtcagtcttgcaattttgtcttcactccaacatagtttagtttaggatgctgtcttcaacttggatattcgttcatgaatattgtttataaattcctgctccaatggtactgctagcttgattttagggttaccttttacaggagcaatttggtagtttggtagatgcaaccaaggcaaatagttctcagccgcaacgttaactgtgtttcttcaagttaacaatgtctttatgtgtttgattgggaagccttgtcttcaccgccaaactaaatgtcactgcctaagacttatcctgacaaattttgtcttcattttcatcacagcaattgttgtgcaatcaataagataaacatcgaaaaaatttacaccaatagaccttgaacacgccatataaacaaacttacatcacatttcaactcaaaaccctcaaatttatagattttcctattacttataagatactcaatcgttcaatttctaactaatataaaatttcacctaacactttacttcaacaaatatgaacattgaacgaccactagtactctctaatatatatgcatataattataaataagtggccgagatattcagaattactagttgtggtcgtgatattttatttatcaaaagtgataagaagaagaaacaaactgcaaaaggttttattcatgcttatttaatctgtaaaaaataaattaaggttatccattcatcaattatgttccttagtttcttcttgatattaacaaggacatggagtgtaatattcttaactcttggataatacgtcttaggtgtcctatataatagacttagcagtctataccacgatccttatgacccttcccatttgcaattaaacaaacggaatgggaattaacttttcattctgttgttctaaggctaattttaggcgtcaaagattacctaaggaagactcatgttttgtaaaggccagttcagtagtatggattgtcaaaaatatcaagcaaacttactttcttattattaagaaggtgatgcaaaagaagaagaataaagaggagcagcatcagaaaatggggaaggagctcacattagaggagtggcttctaaaatcaccaattatggaaaagcatggtaactgcaacggtgatcattgtgatttaaagcatggccctaactgtgattatccctcaatagctagagaaagtgcctatttttctgactggggggaatatagtttgtctttggagcaactctcaaatggtgatgattattcaaatttgaaagatgaaaagtttgatgtaaaagaaatggggtttaatccattgactagaagccaaagtagtaaggtgaagaaaagggtgagctttagactgccagaagtgtcggagactatcatttttgtatcctttagagatggattttaatcagtgttagtgcattaattagtttctatcctcaatctgtttaatgtgaattgtgattttactagaatgatgtgtgtctctcctatcgtttttggaaagtatgtgctagagatttggagtgcaagaataatggatcaaaatctcagacatagctaagaatccgaattagtgatccacctacaatgtgattgtgactatttgtaaggttctaaactgtcaaataatatgtatattggtgtttgagaatttcttgcttccatgttggtttcattttaaggtggtttcaatatcagatgattagaacacttttcatacgctgataatatcctattctgttttttttttcccttcccagctgttttctgtttgttttaataggattccttttccttcttctctgcattactcatttctttggagatgttttccctttgttcctactaactaaatatgtatatcaggtttggttcttggtcagcagatttagcaatgcatggttggcatggcacaatataatggtagcatccaactactattaaaaatgttataggacaaggcagaaaaagccatctttcaacctttaaattataacagaacagaattaattatttatctactaattagatttgctaatgaaatattaaaaaaaagtgttagattgatgaggacaaggaagaaagcaaactgtgactaaatcaagtggcctatacatcaacccagcttgttaggtacaagttccattcatacaactctcacaagatatggacactataatatgtatgctatgtagagagcaaaattagttcagatccaagggaacacaagtcagaaagcgcataatgcgcagcaagtaactagagtcagcaatatgacacacaaacaacacgcaaaagagggagaaaaaacagtaggttggaagtgatttcaacctctcttttctctttcttttgtgtattctttctgactcctcctatgcagtaacacaacacacaaagaaaaaaaggggtggnnnnnnnnnnnnnnnnnnnnnnnnnnnnnnnnnnnnnnnnnnnnnnnnnnnnnnnnnnnnnnnnnnnnnnnnnnnnnnnnnnnnnnnnnnnnnnnnnnnnnnnnnnnnnnnnnnnnnnnnnnnnnnnnnnnnnnnnnnnnnnnnnnnnnnnnnnnnngggtggagaaaaagtctttgtcgtctagttatcttcaagaccctttttctctcagtctctaatcatttgagcaaaagaaagggatgcaactatgtgaaagaactgtagttgctctaatagttctttggcatgactagtggctcgacgttccactcttagaaaaagttcctcacttagtttgtcaccaatgtgggcatcaacaaggactccagacacagtcctgcagctgttggctagagcccttcctacttcacttgcatcatctggttggttcaccacaagtggacttcctcctttgaatacctcaagcttgtctatggcaaatgaaccattagcctcaaccacctccttgaagtcttgcaggcttgctgcatagactggaatgttaaaattgtctcgtttttcttggctaatcaatccctgaaatcaagaatatgatttactataaaataacatgttcatatcaattcataaaaggatagatagtgaattggtcttgaaattaaatcaagacttctgcttttgaaaaggtaacaaaaaattaaattctaacatcagtaatatatgacaatttagatctaccattctattaataatgtatatatactcaactataatgtgaaattatccttatatctatagtgttaagttggtaagtgagatttaccatgacatatgtttgagtaacatgtctttgactgtatttaaagaaccaatataagtgaattagacaccacaccttaactcaaaatcttaagactcagatttatggatcttctcctcacttatatggtgttcaacttgtctatttctatctgatatgggactttaactcatacttatactccaacaattgttggatcccattggcaatgatctttgtatgaaaattcatcagatgaatgcatatccattttgtctatagctttaagacatgatgatcgatgtgattcagtgtttgttctaagctcttaagatatccaaagcctaattgttggtcaacattatggaccacaagacacagccagccggaaattaattatcatttatgccgacatgatgatcaagaaatggacggctagatcaatataggggtggctaatcaacggctgggaccaatttattttaaacgtggcctgagaaaactcatgataagttgtggtgatgcctacaacacttgagcatatttgtcttttaatctctacagtgtctcaaacttctttttggtcagccaatgggaaatagaggctatgtgccactgttgacacaagcaagcatgcataaaaatgtttgtgattatgataattacctcttggacaagatcatcccaagcatcctgaaaatgggtcccaaaaagaaggccagccccaccttggtctgtggggtccactgaagttctggccaagcaaactaagaacatggacccctctctcttcatctccactgaccttgctctcagaaagcctgccaagtctgtttggaattgtttcttgtaggcatttgctgtgctctcactagccccatcgataaacacccttcctttgttatatgcacttgacctcttgtccactacactttctggcacctgcactaaagtaaattattgaaacaaaacgaagagtaaaatatgcactatattttttttaaagactgtatactaattaggctcgaatcgagtaagatctttatgaatgataaagttatcattattaatgtaacaataagctacctattaattggtcacatccaattaactaacattcaccttagcaaattcaaatccatgcatttctgctttttttatgaagttggggtatcagactatctcttggtcgggaagtccataactaatttctcaaactattcatatatgtttaaggagtcaatctctttctaagatatttttttatatgcattggcatgtgatcaagtcctaactatatatatgtataagggataaaattgtcttttaactatgtcacaccatgttggttaatgcaattctcctttagggtagaaaacactgcacactttaactgcaagaaatcagaattttgtatgataaagaacatgttatgtaactctgtgtgaccaataagcaccaaatagtacacacttttacagggggaatcccaactccaattgtgtctcttttggtgatcaaattctttgtgctggccccatatattattgaaatttaagatgcatgaaagtagaagaacattgggtgcttaatgcatgcattgaaattactgtccaaacacgttacttgtttccctgaaacatggtcctttttttcaaccctatagaccatgggttttctgcattcactttttgaccataaattatgacttaagcttcaaattaatgatggctttactatcttatcctcgggaagaggcaaatattcctttcattttgtcgtggaaataacagattagacgacaaaaactacaggaatatagaatctttgattattgatgggtaggttggggagtaaattaaacgactatggcaatatcttgttaacaagaattgcttaatttaaaggatttatgaaattagtgtaatcgtgatccaccaaaagtctccaagaaatgtgtggtaccttaaagttggacttctaatcgaaaggtttataaagatcttgggcaaacaaatgatgaaagatacacataaatgatttgaaataaattatgactttccgtaataatttaaccacttcaattgcaaagagaaataaaccaattaatgaaaattttagaagtaaaaatgaagttatctattgaacttactccctccatcacacactaaaaagaaaaaaaaaaaactgtgtaaaataattaattctttaacttgagaatttttatttttagaaacaatcacataaaatatcactttatttttttattttaaatatttatacaagacaattttattatgtttgttattctctatacaaattaaaatatttaaaaataagaaagaaaatttaaatgaagtgacaatttgacaactgtttattgaaaacatgaaaaaacaaaatcacaaaccaaaagtcagagttgatattaacaattaaaaaaaagtataaacagagagataagagtaaattacaccattctttgaaatactaccctgtctttttaattttacataacccccttaccagttacaggatatatatatcaatggtataatgtgttttctttagtataacaaaaatgatagtgtaatatattttaaataaatgataaaggtacgtaaccctggaaaaattaaagacaaaagaagtatcttgtgaatttggaagaaataagaggggatatcatgatcagtgtaatatattctaataagaagagagatattatttttacttttattttatgaaaaatacattataacttatttcttgaaaaaaaatcctaaaatagtatgtactaataaattaagtgttggttacctgagatagccagtgcaaagagaaggctgagtgaaaaacatcaacggaccttgccggaaaaagcctccggtagaaggaaccgggaactccggcggcgaagtaggagcggtggttgttggcagcgaggcattcctccatgctaacggcgtagttggcgagcggaggaaggaggtggaagagcgtgttgaagtcattgctgggaaggtctgagaagaaagccgagaactctggtggctgccaccccaatgcctcgtaccttttcatcatgtgctttattatcacatccaccacgtttatggtgttgctcccacatgaacaccccaagtccgccaccacaaatgccacctcacgtccctcaacaacctcaactctgtctagtgtctctctcagaagatgaagcatggacctcgcatgtatggcctgcaatatatatggtggattcgatcattaaggaaaaatatcacacatgcatgttttatctactgaatttagtttttcttagtaaattaagacgtagcgtttgtcagataaataaataaattagtttttgtaaccaacaaacatatgatatatatatatatatatatatatggtacctgtgcttgggaattgttggcatagctggcttctcctttacctcctttcatgctaagcaacttctccagttccatattggatacaacaacattgtctcccattggagccatatatatatgatccccaatagctgtgagatggatgaatgaatgaatgaaagggaaattgttgtatatgaaaaataaagacaagagaaagagtctttggaggtttgagagtttggaaaactgagaggctagaggtgatataaatagacagagaagggggggggggctagctagctacttttttttttctacgtattatgttaagcaaccgggcattattatttttgttgttgttatcattataaaaaaaaaaaaatagttaactatactacacaatgggaaaagaaaaataataatactaaaaagaaacttgaaaaaaaggttaaaagctaaagtgtgggcctcgtgtgcaacacggaaggcccaaactggagccggatctttgtattcatataagctacatagaaatatcgattttgtttctgaccaaaaccaaaaaaagagtatttattttgttagaagaatattgtattcgcttgttgtaacaactaattataccaattctattatagagaatatgtcgtaagattcgacaaaagattaaggtttcgatcatctatagctatttttaatggtagaaggattatttttttaaataggtagaaggatcttaatcacacacaaacactaaagtttatgagctatgaagtttactgtgagcagacgatctatattctgaattaaagtttattatagtgtatataaatgatacagatatcttattgcattaattaatccctatatatttgatatcagaatgccatatcgatcggttatattatctgcaaannnnnnnnnnnnnnnnnnnnnnnnnnnnnnnnnnnnnnnnnnnnnnnnnnnnnnnnnnnnnnnnnnnnnnnnnnnnnnnnnnnnnnnnnnnnnnnnnnnnnnnnnnnnnnnnnnnnnnnnnnnnnnnnnnnnnnnnnnnnnnnnnnnnnnnnnnnnnnnnnnnnnnnnnnnnnnnnnnnnnnnnnnnnnnnnnnnnnnnnnnnnnnnnnnnnnnnnnnnnnnnnnnnnnnnnnnnnnnnnnnnnnnnnnnnnnnnnnnnnnnnnnnnnnnnnnnnnnnnnnnnnnnnnnnnnnnnnnnnnnnnnnnnnnnnnnnnnnnnnnnnnnnnnnnnnnnnnnnnnnnnnnnnnnnnnnnnnnnnnnnnnnnnnnnnnnnnnnnnnnnnnnnnnnnnnnnnnnnnnnnnnnnnnnnnnnnnnnnnnnnnnnnnnnnnnnnnnnnnnnnnnnnnnnnnnnnnnnnnnnnnnnnnnnnnnnnnnnnnnnnnnnnnnnnnnnnnnnnnnnnnnnnnnnnnnnnnnnnnnnnnnnnnnnnnnnnnnnnnnnnnnnnnnnnnnnnnnnnnnnnnnnnnnnnnnnnnnnnnnnnnnnnnnnnnnnnnnnnnnnnnnnnnnnnnnnnnnnnnnnnnnnnnnnnnnnnnnnnnnnnnnnnnnnnnnnnnnnnnnnnnnnnnnnnnnnnnnnnnnnnnnnnnnnnnnnnnnnnnnnnnnnnnnnnnnnnnnnnnnnnnnnnnnnnnnnnnnnnnnnnnnnnnnnnnnnnnnnnnnnnnnnnnnnnnnnnnnnnnnnnnnnnnnnnnnnnnnnnnnnnnnnnnnnnnnnnnnnnnnnnnnnnnnnnnnnnnnnnnnnnnnnnnnnnnnnnnnnnnnnnnnnnnnnnnnnnnnnnnnnnnnnnnnnnnnnnnnnnnnnnnnnnnnnnnnnnnnnnnnnnnnnnnnnnnnnnnnnnnnnnnnnnnnnnnnnnnnnnnnnnnnnnnnnnnnnnnnnnnnnnnnnnnnnnnnnnnnnnnnnnnnnnnnnnnnnnnnnnnnnnnnnnnnnnnnnnnnnnnnnnnnnnnnnnnnnnnnnnnnnnnnnnnnnnnnnnnnnnnnnnnnnnnnnnnnnnnnnnnnnnnnnnnnnnnnnnnnnnnnnnnnnnnnnnnnnnnnnnnnnnnnnnnnnnnnnnnnnnnnnnnnnnnnnnnnnnnnnnnnnnnnattttatattcatataatataactctcatctctttttcgtttgctacttttttcttcttcttaatattccattcatttcctatttttcctaattaaaggcttagaaaattaaaaccctgaattcatggataaaaaaagacggttttcacataacctttttgaagaaaaggtaaattgaaggttttcctaaaagcataagagtatattacttttctgaaatcacgattcatgttcatgtgcctcataatcggtctttaattagttggtaaggggaaagaaatgcaacaagaagcttcaaagcagatgccccaaaaattcagttgcttcacaactacaaattaattcagcaatagcaggcattgcatgacatatattgttaattctagagttcatttacatcttaatatgaaaccgtgttctctcgcataatgaagacgttcaaaaacagttgagagaagtaatcgttctagagttttatcggtcaaaagaaagggtaaaaagtgttcaaattgcaaatggatttccatatatgttaaaataaatgacaaattcttcagcttcatgacctggttttagaaagattaatcaattgagtttttatcgctttcttttgtttattaattagttactgttttatttagtttttcctaaaaaatagcacgataaaaaaacatcgattgatcatattgttaataagtctaacataatattcacagatataatttaataccttaaacatatatattattgaccagccttccacttttgatatttttgtgaatttaaaaaaaatacttgcacttttggttttagtaagtataaaaatattttattgagagagataaaattagtttgctaatctttagaatcctgaatgtcgttcaaaatgggttagttgatatgataaggctaggtctcaacgtggatagctttttttattattatttattttatggtaaatatgatttttattgtgctgtattttagagaatttggtggaatttaaatttattttacaaatatgcaattacttatatacctacaatttagtaaacgattcttttaaaataaattcatcgaactattactttatttttatataaatttaagggttaacggtgtttttagccacaactccattaccatgcatgatttcatttttataccaagcggtcaagggaaactcatgctataggcaacgaattaatttaaatgaaaatcatggtgcctaaccatgaattaagttgtgataatgaaatcatggtcaaatcatgaattaattagctacgggtaacgtttgtccttgatccatggcttctccatttatcataagaaaattgcattaaaaagttgtgagtagatcacatcaatgttttcatataagttgtgtttagtgtttatgactttatcaaaaccatttttatataaaaaaagcttatgaagtcgtgagtaaaataaaaattataataatcttctgaaaagttacacttttttttataataagttaaaattaaagttgtaattacgaaacgtaatttcaccacatatataagaaaattaaataaataagtaaaannnnnnnnnnnnnnnnnnnnnnnnnnnnnnnnnnnnnnnnnnnnnnnnnnnnnnnnnnnnnnnnnnnnnnnnnnnnnnnnnnnnnnnnnnnnnnnnnnnnnnnnnnnnnnnnnnnnnnnnnnnnnnnnnnnnnnnnnnnnnnnnnnnnnnnnnnnnnnnnnnnnnnnnnnnnnnnnnnnnnnnnnnnnnnnnnnnnnnnnnnnnnnnnnnnnnnnnnnnnnnnnnnnnnnnnnnnaaaaaaaaaaactgttgaaaaggccatgcatatctatcctcggattcttcattataggggtcaaaatcgtagtagattacgaaatatataaagagaccgatccagagtgggggtgggggcttcagtgatgtcatatatagctaggtttgagaaatttatctgtattttaattttcactaccactatattataattcgtcataaaaattaaaagaaaaaaataatacaggcattgccatcaactggtttttgaaagtttttcctccgtgtacaattccatctaatgcaaggaaacgtaagaactttgtttttataatttcatcaattattggactatctatataggagtatgctctgaggcttaatttcatagaatgatcctagaagtgcatgtaaaattacgcaatctgaattttaaatgatacctaaaaaattgtaattaactaactgtatcagttatatattggcccacaatgtatacttattttatgttaacagtttcatagggtttgacacaaaactatattatatttaagaacaagaaaagagaggattaacttccacagttcaaatctgaacggcgcaaataaatgatgtgattttgattctctcaatctatttttctttgtgcgtctatatatatatatcgagaatataactcaattataaattctcttgatatatattttcaattccttgcataacacaccccaaaaggttgtgaaaaaggcatcatatataatatgacatttaattttctcctctgaaatttaatttacactggaatccaaaaacttggaatctttgtcatctggctagctaatggccccctccttctttttgagttccttcttcaaagtccaaatccaaaccaccgtgatagtcgccatttacgtgaaacaatgccgaccactttatacattttatattatttttagcatatttggttatctccctgcatattttaattgtcattgtatatttgtatgaacattataataatctagcatctacttatatctcttaattgtgggtttgttttaccttaatcccgcattctgatacatgttcaacagggagcactgatatatactctctcacaaaggatcagtagtgttggacataactcacgccaattcaaacacaccctaaaacttaattaaaatcaattggttcatattcatttggataaattgaaattttttttacatgtaacactttaatttaattcctatagaagaaattatacattttcatatttatatagaaaaacattaattcatatgaattgatacctatatattatttgccaaagttataatggtatagatttgatccctatatgaaaaaaattatattctagtccctactctacatcatttattttgttttagtttctgcatgaaaaaaaaacttcatctatgtgtgcatgtatgacatttctaacacagttataactttaataaaagttagatattactttttatataaataatttttcatatgaatatcaaaatctagattaaaacaaataatgtcaaatacaagaactacatttataatttatccttttcgcattcattattctttttattcaacatctatttagattagtggattaggaattatcactactcatatttttggtgaaaccaaaataattacgtttgtgtaggctacctttagtaacttaataaggtcattcaaccaaagagaatgggagacttttagccctaagagagatgtcaaagatacggtgggatggtcaaaagtaagttagtagttatttcccttttgcatatatgcttgtgcaacggttctttgcctagctagattttcttgtgtgtggcccttctggttcaaaacatcagatttggactttttaagacaggtggatgcaagaggccttataataaagtagaataaaagttttaatgagaatgcttactcgtgttttgatgttaattcgtgcttttttactagcttaagatctcccaacagtgtggttgtataattttaaaggaatatattttggttttgcaagtgaagattagtttctgtggtacgttaatgtctttgtgtaaatttagctacgcacatattattttagttcaaaaccactacggttaattaatcacctattaattagctagaaccacaacttgatctaaaattatgaacaaattcttctagcttcctttgtccactatgaatttcttcattcttgtctactaccactacgaaagataaaaggagaaaacatgttacgtagaaaagcacatgctcggagaacttttgaggtccaaatccaatgagtaataatataatatatatatannnnnnnnnnnnnnnnnnnnnnnnnnnnnnnnnnnnnnnnnnnnnnnnnnnnnnnnnnnnnnnnnnnnnnnnnnnnnnnnnnnnnnnnnnnnnnnnnnnnnnnnnnnnnnnnnnnnnnnnnnnnnnnnnnnnnnnnnnnnnnnnnnnnnnnnnnnnnnnnnnnnnnnnnnnnnnnnnnnnnnnnnnnnnnnnnnnnnnnnnnnnnnnnnnnnnnnnnnnnnnnnnnnnnnnnnnnnnnnnnnnnnnnnnnnnnnnnnnnnnnnnnnnnnnnnnnnnnnnnnnnnnnnnnnnnnnnnnnnnnnnnnnnnnnnnnnnnnnnnnnnnnnnnnnnnnnnnnnnnnnnnnnnnnnnnnnnnnnnnnnnnnnnnnnnnnnnnnnnnnnnnnnnnnnnnnnnnnnnnnnnnnnnnnnnnnnnnnnnnnnnnnnnnnnnnnnnnnnnnnnnnnnnnnnnnnnnnnnnnnnnnnnnnnnnnnnntttaataatttattcttttaaatgtcacatagttatgatcatctcttgaagcggttataatttgtatacgtggagtattctcttttttattacattccacgactctcttttttcacatcaattttatctgtaaaaaaatattaaaaaattgtggaattttgattgagaaattatacatttgtaaaaaaaatcttaaaaaagaaaagtgagaagaaaaagaaaattttgaaatataatatatgttagagaaagataaaacataaaattatgtataaattggtgtaaaaattgttatatatatatatatatatattatatctcattttgatttgacaaatattaatcaatgtccactgattagaaaattaaaaaaaaattattaaaatacataaaattgtgttatacataactttttttttatattcgcttataatattcataataaatatttttaaattttaactaggatataatttaatttataaataaaacttgtctttcctatatattctctatctagcctataggcatctagctttatgcccacgcaaattctaaaggaacaccaatctaaaatatattgatctgtcactctagaaaggagcaacccccagaaatattcaaggatagcagttattggtatcaaacttttcaggcaaaaaatacaccttaagagcggtttgtctcgacaaagaagagcgtaaaatatgattttttttttcctttcagaaaagggcatttattaggtacgtacataggagtatatctctacatatccacatattgcattgatttttctatatcaagccatgctgattggcaaacagcgtagaatttcatctccaattaagtgatcgagtctaaactttgaagaattgccagaattgaggtaagcatccacatgcctatatatcagttatataaaattgataggctattcagaactcagtgtataatttgaagttcttccatgatatcgaattcaatgatattgggaaagaaggagatgtacatgaaactcaggactcgcaactttgctgctaatcatacatatatctcgattctaacttaatcaaggagtacgtctcgagttaaattcgaggggaatttttttttcgtctgcgatgatagtcccacttgactcaatctagattaatcatactcctatgtctatgtagttaattttaaacccaaaaaaaaatggtcacaaacacgatgctcatgcaaatggtttatcttttccaatgtaagactttagtcaacgtcttgatatcacgaagctacttcaattcctttgtctctattttcgttaaggcgtcaactatttgtctatactaacaaacttaggccaccaaatacgcatcaataaatggagatagggatgctacttatagggatcgataaaagaaaatactgcactactaacaacgcttttttagagtggtagataataaaaagattagttaaaatttttgtatgaaaaattagtgtcatatttttctcttgataaagattaaataggcggaaccctattaaaattcgtgaacccaaacacattttatactgtactatttgtaatagcaaatgaatccccatgaagagatctttgttgggccttgtgaatcaaacctcagcagaaagaacatggcccaacaccccctgttagatcttcgcatccccccaccttttcatcataatttccaccaatgttttttcatcagtctttcattcgaaaaactaattctggagctgagctagatttttttattttattcaagaaagtttaaaagtattactgtaaaaagatgaagtgactgataaaacaatgtctaatactattagtatttagtagtcgtactgtcaggttgtacaaaaacaccctgtcgccttacacaactagtttttttttacctgtattatgcaagaggaatacaaaaagtttgagtgtctttattttgcacgtttatcgatgaattattggacaatttttatttaaaatacgtttgaaatatgccaatcattacaggatcaatatgtcaaccgtattatctaacctgaactattcaccaatgtgatttattcaattacgaaaataggttagataattgttaaagagtatgaaaaaatttacttagaattttatttttttattcaactaacacctcaattttatcttaaatgttattatttttatttaataaaaataaacaattgagtaatatttactaataatatatttgaaatatataaaacccaataaaactaatactgatacatgttaaaattaaagtataatatttaactcatactattcacccagtataatttatttttaagtataaaaatagacatctacaattattaaagagtgtgacaaataataaaataaaaatatctctaatataacaatatgtgataaacaaagcctgtcagtatgtttctttgaaaaaaatagtacctaatgtaatttgtccagtcttatccaaaatgaacaatttaagacatgtctttcattcgaaaaactaattctagaactgagttagaatttttttattgagaaagtttaagagtattactatacaaagatgatgcgactgataaaacaatgtttaatactattagtatttagtagtcgtaccgtcaagtcgtacaaaaactccctgttgcattaagaaagatttttcatgactaatgatggacgcgaagttagcaggattcaaattcttaacccaaaattcagcattaagaaagtagtttcatgtctgaaaagagaagtgaatatacgtgactcaatcaatatcattttattattaagtggacgatttgaacaaattttattaaaacacctcccgtaaacaacccatgacccaatactaaagctcagccagcaaaatctagaaacaccttggcgatagctagaaaaatcatcacgggtcgccaacttgataacgaaattgccaaggttatgcattttagaagaaatggcttttgtacaaatgaagtatcttacaattcagcaaactaagggaactacactgatctaattcaaagataataatgtaattattgggcctaaagagcctaatgcccaaaaaagaattatacagaatgaatatctatcggaaaaagaactaccaaagcgaaagctaaactaagcagtccacagattcagctacatattttacatcaaaagcaatttatgctgaaatgatagaacattcttgtacgaggaggcaatgttgctgcaatgtgccttataatgggtctcaaatgaatcttaatgcatgctcaattacccatacaataaatatcctgttcgaaaccccaccgaatacctgcatccaaacagaagcacatcaaagatcagcacaggaactgggacggagagaatcaagacccaccaaataccgcttttaacatcccttcatatatgtcttcaaaattattaaggtttaagtgtggatgcatgatatttcaggcaaaaaaggtaaccagatattataaaactgtatcgtccaagtttatctataacaccaaaatgttatgcattcttcaatttacctagttaactattgtttcaggctttatcactaattacgggtggatgcaaataagagaaaagaaggaaatatataaatgaaaagtagattcacaacttaatgtccatgaagctaaaatgcctacaataaatgaatcaagtgggccatgtttgttgcttcctctatattcatctgttcttgctcggttccaagcttgaattcacttctattcaattgaggtacttctcttaaaaaatatcctcaatgttaagttcaaaaccttttaagacagtagtaggctaatttctgcttgaaatgacttgaaagtcctatttgtttgttatgattgttaatttgttatcccaaatttccaattatttttcccttgtttgttgttccaatttaattgctttatcatagagatgaagactgtgattatcacattatcaattttggattctataaattttattattatttttgaaatagtagaaactagcaggtttacaagtctaagcttcagaaataaattcaacccaaattcaggaatataacccccaacccaatgttcccacgattttactaaggcacacaagtgctctaaggggatagaaatattcagtagatacattgggtaaaaataagtttcagccgacaatttggataggtaatgggtcaaatactcaccacgaaaattgcaccatgtaagaatcacaacatatacgttcaagacataatcaactgattacaggttgaaataacttcttgaattcatcataaaaccacctgcaaaacaagtcaaatcacttgagacacctcaaaacaaaaagaagaaaaattgaaaaggccaaaatatcaactctgattttattcagactttgtccagattgattaataatagtgtggatataacagtagattataatagctacactggtagtcggatagtgaaggtatgaacctttaaacgatgatttaatatttgatttcaaaaccagtagttaagcatctaaaacacaaaatgatgcaagaaacagcaatgaaatagaatagcatttatttgcattccaagcttatgaaataacttcatcagaacataaataaatagactagcaaagccacgtatttggtaaaacttggactaactgaatgccaaatatggcgaagtatctattgggttagcccatatgtatctctttttgttaatggcgagttgaagtaaagtactcggattagactcatggattatgttgctcttgttagccctgtaatgttttccgagatgagtaggttaaccgatgttgttatcaaaagaggctgttaccaaggtaattaatagtgtgcaatagcagcagaatggccactagcactagagtgcttttgcattatggaattctttggatccacaatcatgactccatccactattgcggctgctatgggagttgtggttgaggcatgaaccctgcatcctctagtcatcttcggtgagtctccagccaattgaacttttgaatttataatatgtcaattttaggcatattttttatttgcatgcaacttatttttatgcatatatcataattcaaccactatgtgacttttgttatttgcctgtgacactatccgctaaatgatatagcagattatttgctttccaccattttccacaatccgcaattgataacgctggccacattgttgtatggcatttttggggtcacagccaaatcacaaccttttcacgcataatcagagcacgattgttatgggcttcaaaaacccaattttgctcctgcagtagcgttgtttaggaggagggtgggttaagggtgaaaatgacatttactctggtcatgcataaaacaaaaacaaaaaactaccccccagcagcaacgcaccaacaccatcctctttctttctcttgtcaaaagacatcctcttctcttgcccacccacccacaccagagatgacctcttctccgagcgactgcaagtacagtgcagactgctctttcttccccacattccacctgtttccaaggtaattaatacgacaccatagcaccgcagagcagccgctgggcactacagccacatccttgcgtggcagtttgggggtcaaatctgtcacaaccaaattgcaagcttctcacgtgcgattaaagcacaattgtgatgtgtttcaaaacccaattttgcccctgcagtagtgttgtttaggggagtagggttaagggtgcaaatggcaattaccctggtcatacataaactaacaccccccccccnnnnnnnnnnnnnnnnnnnnnnnnnnnnnnnnnnnnnnnnnnnnnnnnnnnnnnnnnnnnnnnnnnnnnnnnnnnnnnnnnnnnnnnnnnnnnnnnnnnnnnnnnnnnnnnnnnnnnnnnnnnnnnnnnnnnnnnnnnnnnnnnnnnnnnnnnnnnnnnnnnnnnnnnnnnnnnnnnnnnnnnnnnnnnnnnnnnnnnnnnnnnnnnnnnnnnnnnnnnnnnnnnnnnnnnnnnnnnnnnnnnnnnnnnnnnnnnnnnnnnnnnnnnnnnnnnnnnnnnnnnnnnnnnnnnnnnnnnnnnnnnnnnnnnnnnnnnnnnnnnnnnnnnnnnnnnnnnnnnnnnnnnnnnnnnnnnnnnnnnnnnnnnnnnnnnnnnnnnnnnnnnnnnnnnnnnnnnnnnnnnnnnnnnnnnnnnnnnnnnnnnnnnnnnnnnnnnnnnnnnnnnnnnnnnnnnnnnnnnnnnnnnnnnnnnnnnnncccccacaaaaaaaaaaaaataaaataaaataaaataaaattcaacagcaatgacaccaacaccctcctcttctataaagacgtcattttctcttgccccccaccctcactcagcagggacaactcttctgcggtgactgcaattacagtttggcctgctattctttctttgccctttcatttcagtctttggcttccagaatgtgctatcctacccactatagcgtatctggggttggtcgcaagattgattacaagggtttgcgtgagaatgaagggagtttccttcatcatatacatgaaagtccttgtttgtgattgtctgccaggttcaattgacaattaagctttcttgtattcatttttttcctggtaaggtaattatctaaaaattacggagtttttcccttttgaaccaaaatttcatcaaattgaaatcaaaatagaaaagcatgatatattcttaatgctcagtcatattggcaagcagcatgaaaatgtgtgtcaatttccaattttccaccaccaatgacaagcctaaacgataattaaaagcattttatctcccttttcatactcagctatttgtttcatctccctgttttctaccaagaataccatgcgataaagtgtaatcatattttctacttgatggctgcattacaaatacgaaaattgtataaaactataaattgaatgaaacaggcacgaagaaaaacaaaacaaaataaaaactctctagaatgatggatgaatataaagaaacaaacctgcaaaggaaaatgggctgcactttagaagtttcctcaattcctaactgacatcgcctgtcattttcttgtttaaatttatcagatgggaggacttcacatggccctcgaatagagttagccatttcagttctatcactattagattcataaaccttcaacaaagaaaacatatctataagaaaatatccatatatatggttctgaatggtgagcatgtccaagatgtgaagcattatcatttgattggaatatcaaacaaaatagaaattaactgtataggttacaagttcaaaccaataaacagtttatggagtatcagtgcatgtaagccaatctagctttagataaaaactgatagttaacataccaatgacaaacttccacacttgcatgaatgcatttatatccatctaataaaaaagacacatctattttttataattttatatataaagctgtatgtataaaaaaaaatacctcgttgacttcagatatacacggatgaccaatattccctggcaaatcatcaggaaagtagcagtttgtcaccttaacccactttaacccagttttgcaatcttcccacatagactgaaaataaaaatggaataaatccctatgttaaaagttccataaatttataaaagtaacattccacacaagggttcaaatcaatcaaaacaaaacagaagcagtaaagtacaccaaaaacaactattttgttattcatatctacttcacaatttttcagataaatttctacaggtatgacataaccgactgctagactatattggaaagcatgatgatttgcttgcctgcagtttagaaggagttagtttcccatggctggtggggaaaagagcataaccctgcagtctatatgttactccatcaacacaacaagattggtaatactttttcttatctactagttgtactacatcaccaatcaattctaccgcatgtgaactatctgacgataatgcagagtgctgtctaccatcagtattagttccagaagttccaacaaaatttgcaagtgcagcatcttggtcatcacgcttaatatcataagttaaactttctcctccatgaaattccttctgtttattattcataatattactgtcgacatgcttatctgatgatacttgagcattgtcttgtgacattgtatgttcaacttgaaaatctagtgatgattgcaaattttcacacttagctggctcagataatttaggaaaagactcagattccgaagtctctttaccagtcaaaaccttagaatttatttgttgaacagaattttcacctatcaaacaaggggaaggactagaagctgcactaagagatttcatagagttgtttggatcaggcttcttatcaatagcttcaatggtggatgaaatgtcagtcccttgcatatctttggtatctggtatctttgattcagatgacaactcaacattgtaattgccaccgcaaacagtttgaacagagctcccatttgttgctaacgtctgtgggatggcctttggatctacattttctactttcttctcagaacatggttgaatgcctcctgtattagaaggcaattttggtggtgtgtttgaggatctcatgacacgaccatattttggaggcaaaggctttccaccacttaaactcaagcacctcatacagtgccaatcaactctattatgaattcctctcaagactgatggctgcaggcacttcaagtgaaatcccttttcacaagcatcacagagaagtacagtatcaacctcattgacactgagctcacacatctgacatgtgaaagccttattcatataatcccttgatggaggagtccacgtgggatggacaggaagctttggttgtaacactttctgaacaatcttagcaatgtcagtatgactaggaatcaaaggaggctgaactatgtttgtggcctgcaatggctggtgcacactaggtaaagttccagtggctgtttgagtgataaatggtctaaagctcgggtctgttgttaattgtggccctgcccttgatacagttacatcaggtgttccttcaaccttgacagaattctgaacaggcaccttgttttctgatgcatttctagctaatgaagcagcttgagtctgtatagaccatgttggagcattcaccaaaggttggtttgctgataaatttgctacagttaaaaagttctaacattcagttgccagttccaatttcatgactaaaatgtcataagatacactcatacacattataaagatacaatagagaatagactaccacctttagctggaaaaaaaaaaaaaaaagagagaagaaaatgccaatagatagttaaaaccttaatgccagctttccatgacagttacatacaaataacagagattgaaggagaaaaaagacaaatggatgtagtttaattccagactctttaaagacaaggaaaagggagcaacatctgctaggagattatatccattcaataacctcacaatagaccaatttgcctagatatacaccaattcagtcaactttcaaaattcatcatgcatcactccatggttaacattcaataaaacctgtaagtattcatccataaaattacagcactttattctgaacattcatttaatgttatgtgttttattgcttcacagtaaaataaaatccatgtcagtgtgttcaattcacattctatcattcaatgtaaacatattgcactgtcaatcattcatcaatcataaatgtaactccaccagtccttggaagttggatccagtgaggagcttcagaggacaataccttggacttgcagcatgtaaggagacccatttgaccctccatcaactttgaactgcgggtgttcaactttaggcaatgctaaggaagatgaatttctccccaagtgactgccaggcatcacaccagaaaccactggtggtcttacttcattgtcgatcacttgatactgcaatgctgcagaagatcctgcagaaacatgggcaggaatagacactacggcacccatagaagggattgatgggtggcttgatttatcagaaggaaaaattcgaacatgtgatggcacacgattgtcaactggtccaccaatgtttgtttgcaagggctgagaggtgtgagttgtagaaggtgtagaaggtgcagaaaatttctttgcttcttccatctgtgaaccaaaaatgatagtaaataaagagaaaataaaggagaaaaaactaaccaaaagaaatggcatagcatcattcttagcataacatgcatattataaataaattaatgctcttacttgtgcgtgaagaaataaaatacttctctaattaacagagttcaacattccaacaaactcaacaaaaagcccactcaagaaggtagtttaagatcaataagagaggcaacacaaaattaaccaaaaaataatccaatactagcttagccaagccaagtaaataaagctcattagtatacaataatctggccaaagattcctttttcctccataaaaaaaatacaaaacaattgcataagaatcaggtgaatttcgtagtgctaggaacactacattcttagtgcatgtttggtaatgcattgactacacacgttacgctcgttttcaggtcaatattgagagagaaaaatgtagaagccacatgtcgttgcttctaaattacacgcgcgggatgcatatccaaacacactgctatcctcattttcctaactcggacacattcacaacaatcaagatagaaataatagtattccttaagcacctatcataacaaataattcaaaacaaccaacacacacattttaacttgagcagctcgcttaacgagatgatatttcttttaattctacatatatgttcactgaataacaaaatgagcaagtcaaaagcatggtgagtgttaattgagcagagagagagagagagagggttggttaccttccacttagcatgggaatacctctcggcaatggacatcttgggagttcgaaaccctaatctctggtccttgagcttggagttcaatccgagatcctcaatgacggtgccaatagcttccctggcgacaatatccttcggagccaaaccctggcagaggctggcgagtttggcgcgagcctccctcatgagctcgacctcggcgtcggagggcttcctccccgcgcgcaccgtggccatggtggagagaaccagcacaatctccgccactctcttcaattcagcgccttggtcgaatttaggtttcttggcgcagcgctcgtcggagtccccgttctgaagaggcggaggctgctgctgctgctgctccagctccggctggggatcggagacggcctcctccatgggaggggaaaccctagagagagagagagagaggaagagagggaaaggaaaagaaagaggtttgaattggaagggttaattaaaaatttggcgggtaagtgtgtgtgtttgagaaatgagatggaagaaggcgtgtaagtaattaggtagtgagtagtgagtttgtgttgaaagaaagagaacgagttgagtttgaatggctgatcagagcgatccctagcgagtagagagagagagacgcccacagtatacaaaaataaaagggcttttggctaattaatagtaacctctatttttttaactcctccccacccaactcgtaacgcgactcaccgagtttccactttccagatcaccatttaatatattgttaattagcattttacttcgtatagaataaatgttaagatataaaatatttttatatgtataaattgctttcagatttatataacaattaatttaaattgagatttaaagttttttttaccaatagtaatttattttgaaaattattaaaatttaattaagataaatagaggtaaaagaagacaaattgaaataaataaactttttttttcatacaaattaaaatggattaaaaggtcaaaagcctataaggtcaaaaggtccacatggccttgtggattaatgctacccctactctatttgccttaaatttaaaaattcacctccacttnnnnnnnnnnnnnnnnnnnnnnnnnnnnnnnnnnnnnnnnnnnnnnnnnnnnnnnnnnnnnnnnnnnnnnnnnnnnnnnnnnnnnnnnnnnnnnnnnnnnnnnnnnnnnnnnnnnnnnnnnnnnnnnnnnnnnnnnnnnnnnnnnnnnnnnnnnnnnnnnnnnnnnnnnnnnnnnnnnnnnnnnnnnnnnnnnnnnnnnnnnnnnnnnnnnnnnnnnnnnnnnnnnnnnnnnnnnnnnnnnnnnnnnnnnnnnnnnnnnnnnnnnnnnnnnnnnnnnnnnnnnnnnnnnnnnnnnnnnnnnnnnnnnnnnnnnnnnnnnnnnnnnnnnnnnnnnnnnnnnnnnnnnnnnnnnnnnnnnnnnnnnnnnnnnnnnnnnnnnnnnnnnnnnnnnnnnnnnnnnnnnnnnnnnnnnnnnnnnnnnnnnnnnnnnnnnnnnnnnnnnnnnnnnnnnnnnnnnnnnnnnnnnnnnnnnnncttctaataaagttggttaaagatgaaattaaaatttattcgtatattcttttgagaatttgagacctaaaaatcttattggtttgagattgcatttaacatgactcaaaagtaaggtttcggagttctaagctaacacacacttggatatcaaagataatccagagcaaacaatggcatcacacatgctaagacatctaatctacgatgccatacaaaatatgaatcgtaaatataaagtgtatgctaagaagcatttcttattaagctggaacaagattgttttctgtaaatatacacgtggtctataaaagaaaaatgtatctatgttgcaacacactgttattatagttgtttcgcacattggatagtagtgaagaaataaatgtttttattttaaaaaactagtttttgttaatacttgggaaaataaaaatattaatctatgtatgatgtatccaaacaaaagttaatatattattttcacaaatttacatataaaaataccaatccctgattaaaaaaatacagaacctgcagagcattccaaatccaataaggacgtttgactattggcagtttttccatgtaatcttcaggacagcatgatttacaataggtaaaatccagagctacaccaatgttcatgtcattcactcttcatagccatcttgataagttgatcattaccttattaccacttagtacacaaagcagacagatctctgagagcatgtttatgatacataagctggtagttgtttgagatagtagtctcctgagaaagaaacatcactacacacagtaatccatgggggagcatacaatatacgagcattcttaatggtaaaaccattaagaattggcagtggaattcctctcaataactgcgagtttaggtatggtatgaggacggtcttgaggacggttgatgtcactgactgtaaatgtttacacagttaaagagtaagattcaacataatagcctcgatatacaatcactaaggtttaacaatcacatatgtcaaaatataaatggagtggttgtgcacatgggatggagttacatatgtgctaaaccgtgtgcagaattttgatttatgaatgaatcagtaaagtgaaatatgaaaggctaaaggttgtaaatgggttgaaaagttcttgatggttggtacatgttatccgcttattaaattattgccaggaaaaaaagatactgcatgtctacggtctaccccctcccctggggtctttccctcaaactatggcagtgttgtcatttgtaatattttggaaatagaccaaaacataaacctgacaccttgaatatatcatatatgtttaacaaatggttggcaactgtgtcactttcgcatttcacatgacaatgaatcaagtttgtataccactgtggtctctctaattgaaacagaaaacactcatgggttgatctagaatagtccctaaaaatagaaggaattatttgttcgtattgttaaatttcatccaattagtagttaaggtagtttggccatacaaataaggccactagaagtagcactggttaggagagtagattgcatggtttttattcctatgaaaaaggggggagaagaccaagaaggacattggagaaagttgttcaaaaaggtctcatgacgaatgatatctctgaagattttggtctttaactgggccgaatggtgtcatataatccatatagctgactagtgggataaggcttttgttgttcaatttcatatcaaaatacaaagctgaatacatttattccaatatacctgaatcaaattcatgtgcagtttccctattttactccatttcaagtacgtggaaaactttctcaatttaagccaaccagcaaggttgtttcctacgatttccacagcacaagaagcactaaaatcctgtaccaataacgaagattaatggacttgttagacaagataatgatcatgtgtcatggctacctctttaaactctacaaaataaataacttttaagaaatagtataatcttaggcatggacaaaaaaaagtaggcaactctgaaaatttaatcagaagatcaatacaaggttatgcgtgtgtgcgcgcgcgcgataacatgatgacaaaaatggtagaaagcttgaatttcatatagcttagtcagaatgtagacacagtatattatgagggatggctatttaaacattgtaagcttcataaaattttaaactatctacttcaatattgactttattaaagcataccaccgagatgcatgcaacaggtatgacttcaccatcttccagaacatcaattgttatgtctatgaaaatgttgacaccgatatctttgtttgtcacttgtatatctggtggagaagatacagagatattaagattcatgtcgtcatttggatattttttgtataattgtggtataaggaatctccattcagcagtgttcaaaagggcctgatcagggagttcatcaacaatccattgcatactatctgcctgagcacaagaacaacaaactatcaaaattatatttcagattatgataacgtaaaagcttgaagtgcaaaatgtaattggagcaacccaattaatacataaagcctaatcaacatcagcactactattttaatctttttctcataaagcatcaacccaattaatacataaagtctaatcggcatcagcaatacaaggtctatttgatgtcagtaagtaatacttttttccaaattcagagcaattccaacaaaaggttccatgaccaacctaaacgattaaagaactcagtccactaatatgtatgaataaatgatgcaagaaaacatgcaaactgtggaacaacaaagaaattgtttcttctgcagattctagatgatgccaaagcctaaagaaacaagctaatgcattacaattcacttgaaatataacggtggaagaaatgcaacaagtaatatgatgctattatacatcacagatatagcttaaaatgaaaagcggaagggggaaaagagaaaactccatttattggactaagcaatgaaaaaaaagggtaaaaacttcaaaaacttacagtgaaataaaccaaggaaccggatttgaaaacactttcgtgtaatgaaattgttatcatctttggtgaactgtcaccacaggaagcagaaaggtctgatcctctgcggtaagcttgaggtaccaaaacttcatttcttcctgtgaataaaccattaatttctaattcaatagcagaatcactcagcactggattgtccacgaaagaaacatttagagcagcagtttcgtccaatgggattgtttttggaagagattgcaataaaaggtcaagagttgatatcccctcatttattttcttagaaattgcctcttcaactgcagatgctatatttcctgcaaaagcatctactagcctgcaaaaaatagaaatatagctttatattccccagaatagtttttgttgcagaagataacggaaacactcttatctggcctcccagtttcaggtcccacactaaagattgaagtattagagtaaaattgaaacatagatctgggactatagctgttggccaaaggcctccccatggaattgtgaagccttaatcagcaataaaagaacataattgtctaagatagagcatgtgtaagaattcctaattatcaaaaaccatggcttaagaaggttccttacacttggtaaagccaagctgctccgccatgcaactttatagataaatctctaacatgacatccagaatccaggagaatcaacttcagagttccttcttggttccttaaattcacagtaagtcccacttgcaaatcattaaccttccaacatagcacagcactatagaatgaggaatataattgactaaataggtataaaaaaaaattatttgcacaaaagtacattactcactcagggttttggctatcagatactgaaatacatgtcttttattgtccatctcaagaccacatctttttctttcttttttaatatctccattccctagtttcaattatactgaattggtatgccttaacaagttggtcttactccaattgcaagacgcggaaaatgcaattttaaccataacctctttatagcttccatagtagtacaaccaggctaactaatttttataaaaataaccaaattcaggaaaacatttattatttagttcaaggtcaaactttcttaattaaaacacaatgcaacaaagcaaattataagccatcaagcaaatcggtgtaactttacaaaaagataaacagtttaatttttacaatcaaccaatcagaaatcatggttaatataatttttaaagtaggtattataaaagttaacaaatttattatacatgatataaaacactttacactattagtatgtaaactatttactcaaagataaaagttatagtatgcagtacaaaatgaaagtagcattctaggttcatacctttacagtagcagttccactgtccgaaattccaattggaactaaccaactgctaacagagtacctccaattcaaactcaaatcagcagtggcacctgaaacgacaagagcaatgcctgtctctccagtattaacagatgaagaattaacttggatatcattgatagtgatgtcagaaagaaccactttggcttttccaacaagagggacttgcacagtcttctcaatctgtgccagctgagactgaacaatagaggcaacagcttgatctatcagaatatccttggcaaaatcaaggcccttatcagatatggccacagagatgaaaccctcttcatcaccacttgtggaggatgaaaggaacagaagggatagaagaagaaaacaaattgagggtgccattcaatttttgcaggtgtgagggatcaagccaatatctttaagcagaccaagttattgaatcttgagcaaaacaagttttgactagagcatggttaattcttcatgtttatccagtgaaagatgaaaacttaaacacacccatatgatgaaataccataccaagggaaacagttatacaagttttcttactattttatatgtggaataatgatttatatcggattggattgaagttgaatttttgcaaacaacgaccaggaacagcaactgtgaatggagacgtagcaagaagtggttggttttggatttttgttaaaaaaatcattattaaattgacatggagatggcatagtagtgatcattgattaatataacgacatgtgagctcgagacccacgcgacctgtaagttttaatttttacttaaatatgtttttgattttataagttagtatttttttatttttgtttcttatgagtttatttttataatttaagttttaagttgtcattttatatttttagtctttataaatttctattttcttttttaatttttataaatttatatttttaaattttaatcactttaagattttaattttttatttataattcctataaattcatgcttacatgaactataaataaataaaatatcttacatagatcataattaaaaaaatattaatttgcagaaaataaaattaaaaaaaaattagaaagaaccaaaaataaaaaaaccactaacttataacaacaaaaatatatttaagtgttctagtttttaacttttgaaaatgcattattttacaatattcccattcttgaacctacatgatttaactttactcttgtacaagtacatacaactcaactaagtaaataaaaaatgttttatattttttccttaaatttttatttttttacgtgagatatatttttttttgccttaaaaaaatatttttttgaannnnnnnnnnnnnnnnnnnnnnnnnnnnnnnnnnnnnnnnnnnnnnnnnnnnnnnnnnnnnnnnnnnnnnnnnnnnnnnnnnnnnnnnnnnnnnnnnnnnnnnnnnnnnnnnnnnnnnnnnnnnnnnnnnnnnnnnnnnnnnnnnnnnnnnnnnnnnnnnnnnnnnnnnnnnnnnnnnnnnnnnnnnnnnnnnnnnnnnnnnnnnnnnnnnnnnnnnnnnnnnnnnnnnnnnnnnnnnnnnnnnnnnnnnnnnnnnnnnnnnnnnnnnnnnnnnnnnnnnnnnnnnnnnnnnnnnnnnnnnnnnnnnnnnnnnnnnnnnnnnnnnnnnnnnnnnnnnnnnnnnnnnnnnnnnnnnnnnnnnnnnnnnnnnnnnnnnnnnnnnnnnnnnnnnnnnnnnnnnnnnnnnnnnnnnnnnnnnnnnnnnnnnnnnnnnnnnnnnnnnnnnnnnnnnnnnnnnnnnnnnnnnnnnnnnnnnnnnnnnnnnnnnnnnnnnnnnnnnnnnnnnnnnnnnnnnnnnnnnnnnnnnnnnnnnnnnnnnnnnnnnnnnnnnnnnnnnnnnnnnnnnnnnnnnnnnnnnnnnnnnnnnnnnnnnnnnnnnnnnnnnnnnnnnnnnnnnnnnnnnnnnnnnnnnnnnnnnnnnnnnnnnnnnnnnnnnnnnnnnnnnnnnnnnnnnnnnnnnnnnnnnnnnnnnnnnnnnnnnnnnnnnnnnnnnnnnnnnnnnnnnnnnnnnnnnnnnnnnnnnnnnnnnnnnnnnnnnnnnnnnnnnnnnnnnnnnnnnnnnnnnnnnnnnnnnnnnnnnnnnnnnnnnnnnnnnnnnnnnnnnnnnnnnnnnnnnnnnnnnnnnnnnnnnnnnnnnnnnnnnnnnnnnnnnnnnnnnnnnnnnnnnnnnnnnnnnnnnnnnnnnnnnnnnnnnnnnnnnnnnnnnnnnnnnnnnnnnnnnnnnnnnnnnnnnnnnnnnnnnnnnnnnnnnnnnnnnnnnnnnnnnnnnnnnnnnnnnnnnnnnnnnnnnnnnnnnnnnnnnnnnnnnnnnnnnnnnnnnnnnnnnnnnnnnnnnnnnnnnnnnnnnnnnnnnnnnnnnnnnnnnnnnnnnnnnnnnnnnnnnnnnnnnnnnnnnnnnnnnnnnnnnnnnngtattgaataaaaactaaatacatttaatgtcttgaaaatataaaagagatttaaagcttaccgtaacaagataaaataagaggatataacatccaataattgaaaatacacatgcacctcatttttatccatgccaacggcatccgatagcacctagcttacatgtaattttgaatttcttcttttgttaaattcgcatttttagttttttattttaaatataaacatttgattctctattttaaaaattttataattttgaacaaatcctcaattttgtctatactaatttcttttatttcttatattttgattaattaaattattcttgacaataccataaataaatatattaagtttatagttcaattgtactaaaataaaataaaataaacaaaacataaaataaattgaaaatttgaccaaaattataaattttctaaaatagaaaaaattaatatctcaattttaaaatatatgatcaaaattgcatattaaataaaatagataaaccaaaatcatattttaattttttatttatttttaaaatattactcaccttttatcaccctttaataactcagacttttggctaaaagaaatacaataactcggatttgcaatcccaacgtaatctaatgaaagttaaactttcttgcatgattgaactgggataaatcatcatttagtcaagttggctttcatagtcataagctttgcattctaggttttctcacacattcttgtctgctcaggcttcaatcattttacacttcagcaaaagctcaataaattactgctaccctttcacacaataaaaatatgtttcttgtgtattttttaagatttttactaaattaatttaagtaaaaacaagttgtttaaattaaggggaaaataattttaaaaattaaaaatttaattaagatttgatagacaattaattttaaatctatcattcttcctaattaacttgaattaaaagtgttactcttcctaattaacttgaattaaaagtgttgatgatgtgctccccatattctttttgtggattagtaacactaaagctcatgaaaatttataaaatatggaaagaaacaattccgataaattttgctagagagaggacccttttctttgacaagtgaaccttcaaattcaaattcaggcatggcaatatttcagtaccaaccaccaggtgtcaaatttgagcaataatacatttacacgtaatacataaattgaagataacaaaattttatggcccaaactttataatcaaaactcaaccagtgggttttttccacagattatatatttggaaagttatttcccaatattccctgattccaatccaatccttcctaatcaagttttcatatatgcaaacgtcattttccctctaaaccctctgtccatcacagcttttgaatgaacaaaggtaataacaacatattgcaaatcacatacaaattcacaatactgctatgatactaaagatggttgaagcagacggatgggatgcagaactcctgcctccagaactgatttgtccttcactgattcctcccgagtcagacatcatcatctccttgattcaagtctcccacaataatttgagcatgtagattatagaaacaaagaaatccacttcataaaaagtaatctggtgctggtttcttagcaggtgttcctcttgattcctacattccattaaaattaaaaaaattgaaaatcaattgacaaatttcacaattaaatttccccgagataatatgttcgcgaagaacaaggaacaccaattgtttgcttaaacatgcaaagatagtgcaatccaaatgaaaacaaactgctaagtaaataaagtaggataaaacacatttttatagtacggaacccaaggtcacatgaaaagcacattcttaaccacatgaatcaatgaatttgacaatagagagattgaagctcgtattgctactatttgagaaaattggtatagctcactctgcgtagggaattcataatggcaataaatatcaggtgactttgcctacaaacctgtggagcagcttcaaacacccggaactgcttattaagatttccatccaactccagaattgcagctacattgccacatctatgacaaagatgaaaatgtcttactaaaaacatagaacacaaataagaaaaaacattttaatagattagtggattaggtacctgtagcaataatttggagctgaccagacagtaactatctggttattgaacatccatttatatccttccattaccaactgatgtgcacgacatatatagtcaatgttattggagtggttaaaggaagtaataacactgccaccaaataagtaaccagcaccacggggactaagaccccagccatccacaatatcttcaggatctgaccataggaggtcacacatggcaccatcatgaggtacttcttgcttccgatcaatagttcgtatctaaatattaacaataaataatataaaaatattgctagtgtacaatctaaacaagaacaaacaaattagggcaaatttcctgacctgatccagtgtagaaatggcaggagaaagaccaccatgaacactgaaaatcttgttttcaattagagcggacaagctgcagtttgtcgttatcgacataggacactattagtggaagagtcaagctataccaattaaatctgtaaatgcagttaggttgtcttacaagcaacttgacacagaatgtttccatttatacctcttgtctcttaatttttggttatttctatgcacgagaaacacttgcattttaacacttttttccgacactccttaatgttgttaaaatagagattctatctaggatcgagaagcgatgaaagatcataaaccatgtgattgtataggattaaaaaatcctaccaaaaaatataaaagtatgataacgtaattaattaagacacgtaataataccacaagacttagataacaattcgaatatttattttgtagtaattgttttattaataataatgcatctcgttttatatttgataatgatattgggggaggggggagcagaaagtgtactggacttagaagccagtgtcaagcccaattcactacttttataagccaaaaaattaggcatggcaacggaacggggcgggggcgggtattacattccccatccccgcccccacccccaaacccgctccccgcccccgctggggtcgggttttccccgtccccgctatttgattaaaatttaaaaaataaaaataaaaataaaaataatataatttttttattaaaaatcggacaaaaaagctaattaagtaacaaaaaaataataataacaaacccacattttaaatatgggatcataatgtaaaaattacaaaacaaaatcaatcaattcaattaaaaaaattagaaaataaattttatttttttatttttttaatattatttattacggagcgtgggcgggggcgggggcgagggcggggcgggtatcagtaatctcatacccgcccccgcccccgcttttggttaccggggaaaacccgaacccgaaaaactcggttttcccccgttaaaatcggggcggattcgggcgggtacccaagggttcgggtcccactgccatgctaacaaaaaattaaggacagggaagacgatcagattgaatcagaaatgctctaacaagaagcggagaacagaaccactcaacactgaatcactagccactacaaagatcagaatagagaaacactccaacccaagtcaaaatgggttccaaacaagaacagagactgaagataagtatggttaccaaggtcgaacacaaaaagagaaaacacggaaaattctcaatatcaggtaagccaagccaaaacgagcttgaaatagagaatagatggcagagacaagttcgaatagagggagatcgcttgattggagtgtcacttaaagaaaaaggggagagattagggtaaatgtataatcttttccccaccagttcataaaacctaacccacaatttcacggcacactctgcaactcgttgaggatatttcattccacaagctcgtgacctggcactgtaatcccattctcatacaattctacatctaatcaagagcacagaatagccacacaagtagatcatacgaccctacaggtaagattgacaatactgctctctttattattgaattgaatcacattatataatacacggaatttacttaataatggaaagagtgttgagaaaagagtattaaatatttgctagcattttcagtctatacatttattagacaaggttgtcaaaataaccaatcaatggattttaaaagcaccctctcaaaattttttccctttcaaaataaacgaagacaagcgacataaagcatccttcttattttaacccagctcaagtccacccaaacccctttccctcttaaaatagaaagggaatgtttacattctgcaagtaatttcaagcatgaattagacacttgaaagaataataaagaaaaatagtccagaatttttctttccagaacgataattccaaagaaaaacaaaacaagcagtccctgtgcccatagaacaaacagacactacaagtaacgagagaggaattagcaatggcatggcatggaaaacacgatatgcagtgagaaaaccatttcagaatttttatagcaaatcaagaaactcttaaggagaagtagctcccaatgcaagactcaaatctggtgatctatcaggtattagcaaaccttaaatagtcgaatatatcggtacaatatctccagacattgactgaaccgtattttctgaggcactcatcatagaatccatatacctgtcaagtgatggatattgaataagtaatctggagtcataaaatgttgggaaaatttttagtgtctttcccacttttcttcatcatgtttacaaaaaggatttatttctttttctaatttagctgatagactaacctgggtgatctgacggctttcatggtttcccctaatgagtgttatccgatccggatacctcacctgattgtatgtcattaattagttacaacaataacgaataaaatgaaagaagcatcattaagagcacaaaaagaatgagtagttcaacatctgacagaacctagtagtcaaaagtaaaaaaaaaaaaaaaaatcttttgtttttcttctttagttcttttagaaaaatgataagaaaaagaattcatcaagagacaaagtagaaagaatgaggacagtgcatcctctcagaaaatagattaaagaaaacagcatagacaaaataacataagctcaaaaggaannnnnnnnnnnnnnnnnnnnnnnnnnnnnnnnnnnnnnnnnnnnnnnnnnnnnnnnnnnnnnnnnnnnnnnnnnnnnnnnnnnnnnnnnnnnnnnnnnnnnnnnnnnnnnnnnnnnnnnnnnnnnnnnnnnnnnnnnnnnnnnnnnnnnnnnnnnnnnnnnnnnnnnnnnnnnnnnnnnnnnnnnnnnnnnnnnnnnnnnnnnnnnnnnnnnnnnnnnnnnnnnnnnnnnnnnnnnnnnnnnnnnnnnnnnnnnnnnnnnnnnnnnnnnnnnnnnnnnnnnnnnnnnnnnnnnnnnnnnnnnnnnnnnnnnnnnnnnnnnnnnnnnnnnnnnnnnnnnnnnnnnnnnnnnnnnnnnnnnnnnnnnnnnnnnnnnnnnnnnnnnnnnnnnnnnnnnnnnnnnnnnnnnnnnnnnnnnnnnnnnnnnnnnnnnnnnnnnnnnnnnnnnnnnnnnaaaagcctaaaataaacacataaaccacagaagatgcttctaacttgcagttttataagagaagaagaataaattatcaccttaagagcgagcagaagcagaaacgtttcaaccgagtaaaaccctctgtcaacaaaatcccccagaaacaaatagttagttttggggcaatcccctcctactttgaaaagctccttcatgtcataaaactgaccgtgaatatcaccacatatctacacaaataccaagacaaccaacaaaactaatcagttgaacacaacaaaaaccagaagcaggatcaaaaagaagaatgaacacagcagtgtagaccccaaatgcacagtaatagaaaaaaaatgaaaaaaaaaaaactttttgtgtgcccccatgacgctctggacacagaacaaagcacaaaacaacgtttttttttgtaaataggtcaaaataaagagacaaaaaacaccaaatccccgtgaaagaatgacacttaacctttctctcatcactatatatgacatttataacaagccctatagagattgaagtcccaagtaaagtagttatcaactaactgatcgtactgaactaaaatccaacgaggtaattttgttgagtatgtgagctgaaatcataagtaaatcgaaacccagaaagaggaaaaagggaaaagagtgacgaacggtgacaggggcgtcgaccctctgaacgttgctctcttcgacaaggatttccatggctttgaggcaaagcgccttcacttcagactccttaagaggctcacacctcttcaactgctctatttgcctgtccaggtctgaagatgacatctctctctctctctctctgcaaccccttctcccccctctcctctcctctcttctcttctcttctgcttcaatcttttccctttttgcaatcaccctctttattttctaatatatttccaaattactcgcttttcatcttttttttttaatagagttctgcatcagatcttatactctttttagttccctctctaccttttttgtttttatttgcatatctctcggccaaaaatcaagattaatctatccacttaaaaaatatcaatttatgaccaagaattaggactagtgtctttactatatttcttaacaaatattctttcgtaacatgaaattgaattcctaatgacgctagtcatatcgcaccattttgataatattttctttctattacagtaaaaaaaatataactttataatatcttttttaaaataaatcataaatatttgaaataaggtaaaccgatatttataaaatttgatgtaataattaataaatgtttaggtaattaaggtcattgttcgaaattgtnnnnnnnnnnnnnnnnnnnnnnnnnnnnnnnnnnnnnnnnnnnnnnnnnnnnnnnnnnnnnnnnnnnnnnnnnnnnnnnnnnnnnnnnnnnnnnnnnnnnnnnnnnnnnnnnnnnnnnnnnnnnnnnnnnnnnnnnnnnnnnnnnnnnnnnnnnnnnnnnnnnnnnnnnnnnnnnnnnnnnnnnnnnnnnnnnnnnnnnnnnnnnnnnnnnnnnnnnnnnnnnnnnnnnnnnnnnnnnnnnnnnnnnnnnnnnnnnnnnnnnnnnnnnnnnnnnnnnnnnnnnnnnnnnnnnnnnnnnnnnnnnnnnnnnnnnnnnnnnnnnnnnnnnnnnnnnnnnnnnnnnnnnnnnnnnnnnnnnnnnnnnnnnnnnnnnnnnnnnnnnnnnnnnnnnnnnnnnnnnnnnnnnnnnnnnnnnnnnnnnnnnnnnnnnnnnnnnnnnnnnnnnnnnnnnnnnnnnnnnnnnnnnnnnnnnnnnnnnnnnnnnnnnnnnnnnnnnnnnnnnnnnnnnnnnnnnnnnnnnnnnnnnnnnnnnnnnnnnnnnnnnnnnnnnnnnnnnnnnnnnnnnnnnnnnnnnnnnnnnnnnnnnnnnnnnnnnnnnnnnnnnnnnnnnnnnnnnnnnnnnnnnnnnnnnnnnnnnnnnnnnnnnnnnnnnnnnnnnnnnnnnnnnnnnnnnnnnnnnnnnnnnnnnnnnnnnnnnnnnnnnnnnnnnnnnnnnnnnnnnnnnnnnnnnnnnnnnnnnnnnnnnnnnnnnnnnnnnnnnnnnnnnnnnnnnnnnnnnnnnnnnnnnnnnnnnnnnnnnnnnnnnnnnnnnnnnnnnnnnnnnnnnnnnnnnnnnnnnnnnnnnnnnnnnnnnnnnnnnnnnnnnnnnnnnnnnnnnnnnnnnnnnnnnnnnnnnnnnnnnnnnnnnnnnnnnnnnnnnnnnnnnnnnnnnnnnnnnnnnnnnnnnnnnnnnnnnnnnnnnnnnnnnnnnnnnnnnnnnnnnnnnnnnnnnnnnnnnnnnnnnnnnnnnnnnnnnnnnnnnnnnnnnnnnnnnnnnnnnnnnnnnnnnnnnnnnnnnnnnnnnnnnnnnnnnnnnnnnnnnnnnnnnnnnnnnnnnnnnnnnnnnnnnnnnnnnnnnnnnnnnnnnnnnnnnnnnnnnnnnnnnnnnnnnnnnnnnnnnnnnnnnnnnnnnnnnnnnnnnnnnnnnnnnnnnnnnnnnnnnnnnnnnnnnnnnnnnnnnnnnnnnnnnnnnnnnnnnnnnnnnnnnnnnnnnnnnnnnnnnnnnnnnnnnnnnnnnnnnnnnnnnnnnnnnnnnnnnnnnnnnnnnnnnnnnnnnnnnnnnnnnnnnnnnnnnnnnnnnnnnnnnnnnnnnnnnnnnnnnnnnnnnnnnnnnnnnnnnnnnnnnnnnnnnnnnnnnnnnnnnnnnnnnnnnnnnnnnnnnnnnnnnnnnnnnnnnnnnnnnnnnnnnnnnnnnnnnnnnnnnnnnnnnnnnnnnnnnnnnnnnnnnnnnnnnnnnnnnnnnnnnnnnnnnnnnnnnnnnnnnnnnnnnnnnnnnnnnnnnnnnnnnnnnnnnnnnnnnnnnnnnnnnnnnnnnnnnnnnnnnnnnnnnnnnnnnnnnnnnnnnnnnnnnnnnnnnnnnnnnnnnnnnnnnnnnnnnnnnnnnnnnnnnnnnnnnnnnnnnnnnnnnnnnnnnnnnnnnnnnnnnnnnnnnnnnnnnnnnnnnnnnnnnnnnnnnnnnnnnnnnnnnnnnnnnnnnnnnnnnnnnnnnnnnnnnnnnnnnnnnnnnnnnnnnnnnnnnnnnnnnnnnnnnnnnnnnnnnnnnnnnnnnnnnnnnnnnnnnnnnnnnnnnnnnnnnnnnnnnnnnnnnnnnnnnnnnnnnnnnnnnnnnnnnnnnnnnnnnnnnnnnnnnnnnnnnnnnnnnnnnnnnnnnnnnnnnnnnnnnnnnnnnnnnnnnnnnnnnnnnnnnnnnnnnnnnnnnnnnnnnnnnnnnnnnnnnnnnnnnnnnnnnnnnnnnnnnnnnnnnnnnnnnnnnnnnnnnnnnnnnnnnnnnnnnnnnnnnnnnnnnnnnnnnnnnnnnnnnnnnnnnnnnnnnnnnnnnnnnnnnnnnnnnnnnnnnnnnnnnnnnnnnnnnnnnnnnnnnnnnnnnnnnnnnnnnnnnnnnnnnnnnnnnnnnnnnnnnnnnnnnnnnnnnnnnnnnnnnnnnnnnnnnnnnnnnnnnnnnnnnnnnnnnnnnnnnnnnnnnnnnnnnnnnnnnnnnnnnnnnnnnnnnnnnnnnnnttaatgacttgatcaatgatcatgcacatcaatgagaaaatcagaaaacacccacaagaaaaatataactactttccaagtgtgtatatagttccaaatagaaacccttcctttcttctacttagcttccatgcatacaaggtacaaaccgtagagttcaagtaacaaatacatatggggagaaaatggtgtcatctcttgggcattcagagaagaaaatagaagagacatgagtaattaatgtgatgcaataaaaaagacaaaagaaatataaaaaaatacaaaagaaattagaaatatgtaacaagtgtaatctctgtgtgtgtgtttgatggtaattttaagtggtgaggaaatcgtatctcaatacaatcgtgtgtgtatttgatagtaactttaaagcaaagaaaaataagaaaatggcatgcaaagacaccagcatgtaattttgaagaacttgagaaatagcatgtcaactaaagtttacaaatattaaacgtttaacagtccaaaatatatatatatatatatatatatatatatatatgcgtcaaggtttacacacagaaatttaatcacagaaacaattaagactcttcggtgtggtgtgttttttttattttggtttttaaatatgatttttaaaacaaaaatgtttggtaaaaatgaaattgatatttttactcatctttatttcaaaacaaaacaaaaaaataatttgtggattttaattttaaaaaatcacacattccctacatttgataatggttattttcgttgtgtcgccatcatcaccatcattgtcatcactaatattattgtcactatggatcgatgtctccatcattgtcattgacatcaacatgatcaccgctattattattatcatcattaatgttaccgttatcacataaaatcactcttaaattaatattaataggatataaaacttttaaaatgaatttattttaaaatttaaattttgaggaaaaaaacctaaaaaaaaaaaattggccatttctttttaaaaaaattgaaacttataactaaaaatcatccaaacaggcctaagaaaatttactttgtgatgttactgtatttcttaaacatttcttttacatatttatcatatcaaatacaatattaattacttgatattttaataatgaaattgacaaaaatttggctttgagcctacagttgagagagagagagaaaatctgacaaaattatcatcttgtgaatttttttatagaaaaagtctaaaccatgcacttgtttatcaaagaacatagtgattaactaaaatgtggttggtatgagtaaaattgaacttgtaccacttaagcaatgtatttaagtcttgtagataaaattgtgattgaataaagaggttctaatgaaggtgataaataagatttattgatataacgtagtcatcaacaaaatcaataatattttacactattatcataggaaaaaaataattaatgagtgctagtaacctattttaaaaaacatttattttaaagacaagtgaccattgaatatttgtaattgaccatttttattttttgtaagttttattcatgagattgaataatatttctttttattatgtttttttactaattggacataggtggaataatttaaagttgtgtttatgaagagaaatcttgtaaatgtgtttgaaactgagattgattgccttgtattaagatgaatttataatttgaacttcttgatgcatgtatttttgtggaattttggacctaatgttctgattaattttggtggatataaggaatcagagtactaatgttaatatgagggtgcgttctcaataatgatgaagctagaaaagcatcaggttgaagattttgcgatgattgtttggagcatctggcaaggatggaatgaaaaacagtgaatataggatatgatggaaacctcgaggcagattctggagaggggatgatggaaagaaagttgaaaatcgagagcacactcttggcaaggagaggaactaaaagactatttggatacaagtcagaagtatttttgagaatttttttttattaaaaaaagtactatatttttaatagaagaattctcaaaaacactcttaacttatataaaaaaattctttgttctttgatgatgaaggaggcttcgggtatggtatgtgcctgagagacaatttcggacaattttgcctacccttagtggaatgcaaaccaactaatcttcctgtccgtcaaggggactcaattgttgtgcatgcatcaacttgttgcaatatggactccttctggtgatatctttgaatttgacaagttcaattatattattaattcaaccaacaaataaaaatcataacatcttttaatacattcatacattatccaacaattattagctaaacattttattagaagacatacttgacacagatagaatgtgttaaagatcaatagatccccacccttacaaaagcttcccaagtcccaaaagtattctaccctgtaaaacctaaaaatctacaactgttctttttcttttttacttttctcttctgcttaataccgctgctagataaggattatgcatattagttaataaaaagatattaagtgagttagatgaataaataagtgaagggagaaaattggtgagtatgataatcataatggtggtggacaagtgattatcataatcataattataagtttaaaatatatttaaacgtgataaattaaaattaaatatttattttctaaaacttaaaaaataatttttttaaaaatttaaagtaccaaaataaataaataaaacactcaaacatgatctccagaaaaagttacatttatttttagttttttttttatgtgttcctagttcctaagatagagaaaatgctcgcgaaaatgataccttaaaacgacgtcgtggtgagtgaattattcgaaacctttcatcttccacaatcccgcgaggtaaacgacggtgacgattggtgggtggcgccgtacgcctcatcccatccatcgccatcggcaccttcctaaaacgacgtcgcatccatcaccccttttctcttcctcacagtcacagcagtggtagcttcccaaacaagagggtaatttcttatccgatcgtttcccctctttactctaattcccattactttcggttatcaacacaattctccttctgaactgcactctgcttcttcttttcttgaattgtgcgttttgtgtatgtctgattgtgaaattagctcatgttaaagatctcagcatctcatgatgactccatggtttattattaccctgtgcgatcatgagttttaagggttcttcatgctgttctttcatacttgaattgttgtagtaaattagtaattaccagcaattcctttttcggactcgctgttaaaagcaattctggtttaaatgaagaaaaactttgttgagataagtagtttaatttgaacaagggtaacggtaaatttgtgtatgggttggtttgtaataagcaattaaaatttatcttgtgataatcatgtcccataccgttttgaagattcctaggcctttctagtttatttattaccgagcaattctttagatgcttcgggtgttgttctattaaaattagagtttcagcttggtaacatgtgcattatgatttctaaggtaaaacttcaattatgattggaaaataacatcaaaagtacctaaacaaccgcatccaagttttttccacctgttaattgttgtgctatttcttcatttctccgatgtaaacatcatatttgtttgttttttttttctcacttttttctttctttcaggccaatggcatcttcttcagactcatgggtgaaggaatataatgaagcactgaaacttgctgatgatatcagtggcatgatttctgagcagagttcatttcctgcatctggaccagaaacccagcgtctttcatctgctataaggagaaaaattacaatattggggaccaggcttgatagcttgcagtcccttttgtcaaatcttcccagcaagcagcccatgtgagtgtgtaattgttgattatgctgattgaaaaaggtcatgctgtttattaagctatgtggtttaaaatagaagaggcaatgttttcaattcagctgtgaaggtgtatgatgaagtttgcactattgttttatgaagtgtattttgctgacttgacgcagatctgagaaggagatgaatcgtcgcaaggacatgctttcaaatttgagatcaaaagttaatcagatggcttccacgttgaacatgtcaaactttgcaaatagggatagtttgtttgggccagaaagaaaaccagatgcaattaccagaacggttgacctggacaacaatggacttgttggacttcaacggcaaattatgaaaggtcagttgattggattgtttgaaaatatattgcttttaatctgttctttggatctgatagtgcattgctattcaagcagaacaagatgatggctttgagcaattggaagagactgtggcaagcacaaaacatattgcattggcagtgaatgaagagctggatctacacactagactaattgtatgttccctttgtgcattaatttttgttcttcccgaagctttggttttgatccgagctgaatgatgttgtgtaatctatgtagccaacctcagctagtggttcaaggctttgttgtctcccttctaaaactgaatcttttctttttgtctttgtctgccaggatgacttagaccaacatgtagatgtcacagattctcggcttagggtaacactcttatcgtaaacttcattgggaccaaatctcttgttaagtcatatcaaggttaaattatgttaatattattgacatttacttgttgcttatcttttatgtttctgttgtgaaaacagcgggtgcagaagaacttagcggttttaaataagcgagccaagggtggttgctcctgcatgtgcatgcttttatcagtggttggtatagtggctttggttgttgtcatttggctgttggtcaaatatttgtaatgaataaaatacccaaacttggcaagagtctgcttttcatctttgtttctgccgtgtgcactaaagaatcataaccaggtttcctgatttctcttggtacttttccaatggaatggaatttgttgaggttgtgaaaggcgatgtattgtattgtaattgccatatttaggtgttttatatatcatgtgtttttctcttgtacaaatatgaaagtgaatgctactggctggagtatcaatgtggttgagttttcacacatttctccgtgagattgtgctcaagtattatgaacgtgatttgcattaatatcgtgcaactttaatgtgcaacccagttataaaaaataaaataaaaactttaatgtgcaaccacaacgaggtacttaagttaaatttcttaaatcccatcataacatttcatttttttccctttctttttacacaatttaagcaattttttctttgatgatgtaatttcgaaaaattcaataaataaatcctacaggttactctactcctttaatcttattgcttaacttaaattttttgttttgtttttaatattttttttccagctattcaaaactttatttgtaatggtttctagattatctttctcaaatgcattgatcattcaaagaatcattgataatccaaagaatcaatataacgtttttcttataaaaataataacttcatcactttatccttagatgacatttaaatgcattctatagtcagatcttcacacattaactataagaattcctcaatgcttgatcatgatgcaataccacttaattataaccttccctcgtgtttttccatgggaagaagggaaaatcctaaggtaagagagaacaagaggatattcatattcaattcaatttataattcattgttatcttaatctagcaaaaacgattcaaggatatattttgtttttattttcctttcatttgtaattacaaaaatgtcattataatttctttgtttcatgttttaaataagaaaaaaggattatacactgacagtgtaaaaaaatttacacagttattcaatcacaatctatcatatatgataaatttgttgacttttaaaataattattttaaagtaatttaaacggtgattcagtgcatatatattaaactctttaaagaatgtctagaaaatggtaaaaaaaaaaagttttttattacaacttgttatgcaaatctgataggagtaggaggtgggacaaaatgcataaaaggagggtcaattagttaaatacatttatttagttagttatactaaatgtgggagggtcacaaatagataaataggaggtgagtgattgaagaaagggaatccagaaagtattaggagagtggtgaacctcaaattcattattgtattccaggatatattctccaatattcaataaagattcattctttcttctcttaaatctggttcagttcctatcattcttgaaaaaacaaaataaaatgaaaataaggtaattattttgtaattaaaagtgaaaataaaatcacaacatattctcaaactaacgcttttaaatttgaaaagaaagaacatcaagagaatgatatcccactaaattaagcatcaagatcattgtactacagaatgactacaatataataattggaaaattgaaaagggtaaaagaaccataaaactaaaaaaagagctttcgtggggatggtctagattcaaccttgtttgaggacttggggggaggagggactgccctgctttcttggccctcagccactttgtcaagcagctttgcagcccttggatctgttagcaacttcttctgaaaagactgtgagaagccagttgcaatgatagtcacgtgaatctccccagtgtagcgatcatcaacaacagccccaaatataatattagcagaaggatcagccaaactagtcaccacctataaaaattacacgtgttaaggacaaggcaaatacgaagaaaaggtaggagtgaacccagtacgtataccaccatacagcaaaaggcggaatacagcacaaactgaaaagaaaaacagacccctgagggaaatattgatattttcctttttttttttttttttctcttccagtgaaaggttgggtagctatccgaaattcttgattagatgaattccagaggaataaataaattttttaacatgttaaggtaaaatgattgcaaaaatataaccataacaaaaaactgcagcactatacttgaaatcataaacacaaaatcaagaaacattataaggttagtttgcaacaaattcacaagataaaaggaataacagaatgtttcttaagcaagtggtgacaatctttaaatacctgagaaaccctgttcacttcctgcagggtaatgtcctttcctccagtaatattatacactaccccagtagctgactgaatagatgatccaattaaaggagccaaagtagcctgttctgctgcttcttctgctcggtttttacctgatgaaacacctactccaagcattgcagtcccagagtttttcatcacagcttttacatcagcaaaatccacattgacaagtccaggtacctgcaagaaggcacaccagtttattatgtccagaaaaaaatgcatggacatacccttgacataaatgcaaagccacaatgcccaattatgaaggagaagtgagccagtgaccactcaaaagcactaaggaacaagtagggggagaatagttcaagctttttatgtttcccttttctctttgcaagtaaggaacttaaatcatgttctagtgtctgaataaaaaaatatgaatacatagtttgccaatcaactcactgttataatgtctgatattccctgtactccttgccgtagaacatcatcagcaagacggaaagcatcctgaagaggcatctgctcatcagctatgtcaagcaaacggtcatttggaatcactataagtgtgtcaacattttcctgcagcctttcgatggcttcaaaggcctgaagaaaaccaaatgcaaactagagacttattttctagatttcaaaagacaaaatacaagtttcagatgaaccatatactcttatctgctagataaaataaatttcagacaacaaattatatatactggatgacacataacttggataacaaactatatggtgtgtttggaaaatccattcatttcaacacaatgtcaaaaaatgaatttccaaacacacttttaagttttaaccagaataaaataaactgcaaaggaagaagataagtgatatttttcaacatattaaaaaaagaaggtagtattaaattaagagcaaaactaattcagtagtcacattcccaaataacgagaaaaaggacacctgcctgcaaggatctcttacgtccttcaaaactgaagggataggtaacaacacctacagtcaagtaacctgcctcttttgatatttgggctacaactggggcagcaccagacccggttcctccacccatcccagccgttataaataccaaatctgatcctttaagagcatcagcaatagcatctctggattcctccgcagcttgttcccccaaaagtggattcccacccgtacctgcttgtctatcaggtaatttgaatcaaaggccacccctcaatttgtcaacaaattcagcaaagaaacaagactgtagccacaaaaacaaatcacatcatagtaaaaactatgcaagtagagtgcctgacctaatccacgagtcagaacttctccaattttaatagggttctcagcagcagaatttagtagtgcctgagcatcggtatttatcgcatagaagtctacaccctgattgaatagaaaatgcagcagaattcaacaataacatctgcattattcacttggtggcagcaaaacacaaaggcgaaaaactagatgcatttatttaggtgcttttgtgttgttctccaatcagaattggagtttcaccttggcaacctatgccgacatccaatataagcatttattatgcaaactatcgaggtgaaactctaattctaattggacaaaatctcctaaataattacatttaagttttgtccaaacacgaatggtatcttaaagaataacgccactggctaaaaattaacatttgattaaataagtgaatctaaaatgtgcaatcaagataaaaaagaagaagagtaaatagaactgttattctaatttctaataactattttacttcaacaataactattttacagtggtataacctccaaacacaagaagtaaagcattggagtcactacaaatagaaagcattgaaaaaaaatgatattgataataatcagtcatcgatgttccaaattgggtggcaaagacaatacccaattgacccacctgcaaaccacttccaatcatgcgattaacggcattgttgccgccaccaccgatgccgacaaccttaattttggcgttatctacgtaagcgtaggagcatctcaccgacccgaaacgacgacttaggcattgaggagcaatttttgttgttctggggttgaaggaaacggaagttgtgagtgcattctggtggaatatagaagagcatgagagtgagagaagctcgtttgggttggggtttctgaggggatgaagcatcgccatttttattttttgttctctctctcactcacagtggttttttttttttttttttttttaattggggttttaggacaaaatgaaaatggaaagaaattgaagctgattaccctccaattttgagtggattttgtttacttggttggattcgaatcacatgaagggacgttgcttaataacggttcatcgttacggaaaacgacgacgtcgtttttcactccactcttgtctcttgcacgttggcttgcatattccaaactttgataaaaaactatttttgttcctgaatatataagatgctgaataatttgtcattgaaagatgaaaatttaaatttttgattttaaaagtgaaaaaagtgtgacaaatatatccttccattaactttctccgttatgttaatattcatggatgaatttgtcagctctttatttaaaatataatttagtctttatattgtttcttttttaatcattgtaattataacattataataaacatttaaaaattaaaaaaacaagtaaaaattaaaataaacataataataaacataatattgattagtaaatataatttattttactttgaaatttttattataacaatattaaataatgacaaaatcaagttagatctcatttttttataagaattaacttaatgattatatatttttgtttggatctcatattttgaataagatactatcacattataaattttaaagcaaaaatatgaaataatatcttacccaaattatgaagctcaaacagattaaaatggtgaagtgtaaatagcaaaagctgataaacgtggcccaagaaacccaaataacaggataggagggaataagatgggcccatatgcgtgcaggtataatgaataatgttcaatcaatcagtggctatgcgaggtgatcaaattcaaatcaaaccaaattgctaagaagcttcagatcactaatacgacgacgcattaccggaactaaggggtaatgttaaaatatgtaatgttgtgttgtgtcgtttcgttttcactctcacgttctcaaattttgtttgtctcacaggaattaggatccgttatggggttctctgtaaccacgctaattttcgcagtgattggaatcgtggcgtccctttgtaccagagtttgtttcaatagaggaccttcagctaatctgtatgctatgcttgcttcttcatttctttctgggacttatgaactaatttaataatttctgttgctaatcttacacagattacaaataacaaattcataatctcacaactcatagatctggaaaaattagttattgaaggaattgtgatattgccaaacatctttgtggatatgctgctctatttaattaatagctgattctgttatgaatgccttgatgagttttacaatgtgatgtgattgatgtatttatatctatattttagtttgtgtcaaagtttttttgtattcttgaataatgacttccttgaattttgttgtgtctcatccatcctttccattataatgtttcctctcacaaaattattgttctctgtatgaactaatatcttattactttgttgcagatttcacctaactttggttcttactgcaacaacatgctgctggatgatgtaagtacacctttgatttgcaagttcttttaattttcatggagttagaatagggaattgctgcactgtacaagttttgttcctgagcttgttgccccagcaagctgttattcaattaattggaaaaggaatacactaaaatcaaaggtttcattttatttcctaaatgaataacttctccggctgaatgtgtccataatcagttctgctgaagctgtttgtgtacctgtccttttactctccatgaccatgatactgccacatgaatttggagtaccttttagttgaattaatatgtgtcctgcgtaacagtaccaaacaaaagtaattgaagaggaatagatgaacttttcaaaatcagaatctgtttaggcaatcatgcctgggcatacccatgcctttggtgctttactttggtcctaagatgggactgttcaccaccatatttcacaaggagaccaaaggatatatgatgggaagctttggcttgtgcttgatgcttaaattgactgtaatataattgtagtgatgttaagtggaaatgcatcaaaacttgtgagtagtttctgaatcaagaagtcaaatgcttgaaaagttatcatttctctgatataactacttatttgctgtctgacagtatgtccagcataattaagggaggagggaaatgaccttttgatggaatgaacacatgctttgctgaattacattattattattattattattattttttttttggaaaagggggaatacaaaaatcttttatagtctttatcaattaagttcattttatttctcctggtgatgtaattttcatagttctaaacatgcctgccttgagttgacaaactttggttcattaatttgtgatatcattttcctttggttcaatagtaattataactggtaaatagccatgtcctgttttattttccattaagctttctttatctttttgcttacttttgttctttatttgctatatcaggtgggcgattgtatatctagcacagatgaaaccgctcatagtacctatcttgagtgagggtgaataactttctgtataaaccgatgcaactcttaagaatgtgaatcactagttagacgctggagaggagataatttcagctctcataaataattcagtattttctctggctggatctgtatgtattcttgttggataatgacgtttcaattggatcatcttccactgcgggcattatcccatgttgttacaattgttgtattcaatccttgttcgttccataagtattttggtgaaataagttgatacaagaaaattatatctcggttttactatattataaaaaataaaaaaaaattgatgagaggatttttttcatgcaatcatggtctcatgtatgatcctgtagaaaagaaagaagctctggtcattaccaattataagaaacgtgatgaattatgagacgtcacatggatttttatttatttccggttataatgttgtccataagagccaacatacatacagatggtaaaaaaaaatgaaaaaagaagccttttatttagtaaactgtaaccgaaattagcacgaggtgaataggttttcttttgcaattgattaatgcttgcatcgaatgtgaatcctctcctattgttaagtagcaagatacggtcatgttgaagagaaaaatacactttacaaatatttcacaattatcgttaccctttataaattatatagcaaattacaagtgattcacatactgattgttgaatcacaaaagctcaataacagtaggaaaatagaagaaataataaggtcaataaaaatggannnnnnnnnnnnnnnnnnnnnnnnnnnnnnnnnnnnnnnnnnnnnnnnnnnnnnnnnnnnnnnnnnnnnnnnnnnnnnnnnnnnnnnnnnnnnnnnnnnnnnnnnnnnnnnnnnnnnnnnnnnnnnnnnnnnnnnnnnnnnnnnnnnnnnnnnnnnnnnnnnnnnnnnnnnnnnnnnnnnnnnnnnnnnnnnnnnnnnnnnnnnnnnnnnnnnnnnnnnnnnnnnnnnnnnnnnnnnnnnnnnnnnnnnnnnnnnnnnnnnnnnnnnnnnnnnnnnnnnnnnnnnnnnnnnnnnnnnnnnnnnnnnnnnnnnnnnnnnnnnnnnnnnnnnnnnnnnnnnnnnnnnnnnnnnnnnnnnnnnnnnnnnnnnnnnnnnnnnnnnnnnnnnnnnnnnnnnnnnnnnnnnnnnnnnnnnnnnnnnnnnnnnnnnnnnnnnnnnnnnnnnnnnnnnnnnnnnnnnnnnnnnnnnnnnnnnnnnnnnnnnnnnnnnnnnnnnnnnnnnnnnnnnnnnnnnnnnnnnnnnnnnnnnnnnnnnnnnnnnnnnnnnnnnnnnnnnnnnnnnnnnnnnnnnnnnnnnnnnnnnnnnnnnnnnnnnnnnnnnnnnnnnnnnnnnnnnnnnnnnnnnnnnnnnnnnnnnnnnnnnnnnnnnnnnnnnnnnnnnnnnnnnnnnnnnnnnnnnnnnnnnnnnnnnnnnnnnnnnnnnnnnnnnnnnnnnnnnnnnnnccatcaactaaaaattagtgtatgtcatatagagattagtccatagttaaaatatgataatattaaactactaaataattcctctaaataataaactaagaacaaaagaatgcagtgactatatttcacttgtttttctatatagataaatattcatacataaaacaaaattagtaagtgcaaaacgtgcaagaagagcaacaatcgtttacttgtcgaaaaataaaattaaaaaagaaactgtaaacagataatttacgtcttgttcaaataatacggggtataatatgatgcaccgtgatgctctctgattaatgcacgagacattgaaattggaaaagaaaattgagaataatagaagtgtttaatgtttatataagaataatattaaacagttttacactaattataaattaaaatttttatgcgtgaatccatatgaattggagatgaaaatgtgaaagatatttttggtattctattgttacaaaatagtgtattagaaatttaaatgatgtaaaaagcataacctagaaagttgccatgactgcggacaccgaggcccaatgggggcccaacacggtattggacatcaataatgatctcacgggattgtatacggtgttacgcagggtatatgttacaatgaggttcccccttctccccaagaaatcacgcaaagaaattgacaaataagggtcatctgacggcaattgaagctcaatcccaaatgcagcattgaccacaatgttgcacagtcccaaaacaacatccattaaaagatacataagggtgcaatatatgcccaaaataattgtagggtgaagtttttgtttgtagtggtctttaaggcctatgagtgagagaccaaaaagcaaggccttgattggaaaaataatgaaatgaaattttaattttgattttgatgggttttgtttttggggtgagcctatttgggaggcatgcaaaggagagaaactgagaaagtgatgttgggaggacagtggtgagttgaagtggtaggatggtgaataggtacaacactggggagagggacaaaaacctcaacatgcctttgggcacccttgatgacatgaaataacagtaacatagggaagctaggattccaacccataccttcattaagctcttcatttctccttccatttccatacattttgatacttctattcttcttctttgttcttaatatcccaatgattttggtggcacttgtggaatggaacagctttattaattgttatcgaccaataaccattcggaccatcgcgcatagtacagatttctattcttaaatctgctggtcaagatattttttttccttctttttagtgtgcacatggtgacgggtagaaaatttaaattatttactacacattatgaaacgtaaaaaaatagaattaaaactcttttatataaaatagaaaatttatattcttaatatcacaatgttcatatgctatgacatgttcatatgcttagagggctcgaataagcaccatgacctcgacatggacatcttgttcgtgcgatcagagatataagtaatttatctttaatggataaatatatagtaatgtctgttttacttttctctcaaagaaataagtaaagcagttgagaactacgttttgtatgaacagatcctgtccactcattttgatcaacaatgtatatttcttcaattgacactccagattttttcaacgtgagaggacccgtgtccaaattttttcgaaaatacataaccattaaactctaagatttatatccatacacacatacacgtaagataaaataatataatgtatatttagtaggttctttggttaatctgttttcaatttttgttatttgtgaaaatagattagaattttaacccaatttattgaaatgaatttacatatttcatccttttttctaaccagtaattaattatcactagcttaccataatctttatcacttttccatcataatttttgttattattattattgttaccatcactcttatcatcattattatcattattgtcataattattattatcgtcactacacccattattattaatattgttatagattgatatcatcacactcaccattattatcatcactacaactactattattaaaataatgttaaattaaaacttatatttctcttatcacttttatatccatcttatcctaaaatatttctaatacaattcaaacacaaaaatcacgagagtatttatatgataattatcaataaatcccaaaagaaaaannnnnnnnnnnnnnnnnnnnnnnnnnnnnnnnnnnnnnnnnnnnnnnnnnnnnnnnnnnnnnnnnnnnnnnnnnnnnnnnnnnnnnnnnnnnnnnnnnnnnnnnnnnnnnnnnnnnnnnnnnnnnnnnnnnnnnnnnnnnnnnnnnnnnnnnnnnnnnnnnnnnnnnnnnnnnnnnnnnnnnnnnnnnnnnnnnnnnnnnnnnnnnnnnnnnnnnnnnnnnnnnnnnnnnnnnnnnnnnnnnnnnnnnnnnnnnnnnnnnnnnnnnnnnnnnnnnnnnnnnnnnnnnnnnnnnnnnnnnnnnnnnnnnnnnnnnnnnnnnnnnnnnnnnnnnnnnnnnnnnnnnnnnnnnnnnnnnnnnnnnnnnnnnnnnnnnnnnnnnnnnnnnnnnnnnnnnnnnnnnnnnnnnnnnnnnnnnnnnnnnnnnnnnnnnnnnnnnnnnnnnnnnnnnnnnnnnnnnnnnnnnnnnnnnnnnnnnnnnnnnnnnnnnnnnnnnnnnnnnnnnnnnnnnnnnnnnnnnnnnnnnnnnnnnnnnnnnnnnnnnnnnnnnnnnnnnnnnnnnnnnnnnnnnnnnnnnnnnnnnnnnnnnnnnnnnnnnnnnnnnnnnnnnnnnnnnnnnnnnnnnnnnnnnnnnnnnnnnnnnnnnnnnnnnnnnnnnnnnnnnnnnnnnnnnnnnnnnnnnnnnnnnnnnnnnnnnnnnnnnnnnnnnnnnnnnnnnnnnnnnnnnnnnnnnnnnnnnnnnnnnnnnnnnnnnnnnnnnnnnnnnnnnnnnnnnnnnnnnnnnnnnnnnnnnnnnnnnnnnnnnnnnnnnnnnnnnnnnnnnnnnnnnnnnnnnnnnnnnnnnnnnnnnnnnnnnnnnnnnnnnnnnnnnnnnnnnnnnnnnnnnnnnnnnnnnnnnnnnnnnnnnnnnnnnnnnnnaaaaaaaaaacatattcacatgtgttctttgacaaattgattgggataagtcaaaacattggtagactaaaaacctaatctatactgtcatcatcatcaacactatcgttaacccaagttaattgaggtcgatgatagatgaacccaatgataaattgaaaataggacaaaaaagagaaaactctaatcctataccacaaaaaaaaaatcaacaaatccaccttgtttaacgaatctatcgacagaaaaaatatatcaaggctttgagacattcacacagcatttaatctttttcccatgcttttatcagcctagaccttataattcagtgtaagaatgaatgagaactaattataaattttctgtttatctgccacggtaaatggtcaccattgttggccatcataacgtaacgaatgacaaaatacaaatacagtagtggaacctacttaaaggaaatataagggagaagtgtgaattgatcacattcatttctttcttcccctctaagctttattcattctgatccctctgaataagcatttctctccaaagaacaaagatatttttgtacagactattcacatatactattctaaaggtatgttttcatccctaacttttttgaaggttgagaccattgtgaagttgtttcttaagctttgcaagttcaatactcgttatattctccctttaacaaaaacatttaacattcatctcatgccaactagatgactcataacagctcatctcccacagaaacgctgtcagactcgggttgtgaagaagtggctgtggtgtcagaggtggcatcgtcaacactcaagttggagaattcgccaccaatggcagaactttcatcttcaccacataccgaaggtgccagggattcttcgggcgtggtggtagtagcagtgccggcaggtgaaggaaatgaatccatgtcttcagtctgttgttgcaggctccaatacattatactggctgcaagagtgagaatcatcttctgattaacctggcatgatatcaacaaagaatcaatcacatcataaacaaactcaacccagaatgtgtcaacttaattttttggtatcattgccaaattacatgatggccttgtttgaatgaagttctgcataaacacttgtagaagaagaaaataatgtaaaatgaattaaatttcacccataagtttaaatcaatttatgcacttagcttttggagaacttaaataaaagaacttcttataaaagctgaagtgtaaagtttgattttaaattacgggagaaatttaaattattttaccttgcttgtttctcttataagtacttatgaagtttattcaaagaagactaatgtgtataaattttgtagcaaatatgaatgaaactctcaggtggcaagaggcaacatacctccataatatcctcaggtaacaaaaatatgcaacaaccgagcttccgtgcaacactgattatataagtggcattcaacctcttctcatcatctacaattacaacaaattaagccaatttaggagggatgaaaaaaagtagcaagtaattacatgttatacaaaggatctgtttaatatccctataaagaatcataccgctttcacccttggtgacaaggttccaattgacaatcctaggctcaacagcactcagaagctcaaggaaaaagagtccacttgacaagctcttatcctgtgcaaaaaaattgatacaaaaatttgtcacggataaatcattattttatagtttacagttgttgggaattgttaacagcaaataaaacagagaatttcttttggaaaaaaccttgaagctctctatgtgagaagttctgccaatgctcttcacttttctgttcacccatttcagaatatcagcatcagtgatctcctttccttgggaatgagatctcaaatttttcaacagttgaagcattgtgaatcgcatgagctgccacaataaagctggaaaaaaatatcttagataaaattgaaagccaaaacaaataggtgggaaagcggtcacaaaaaaattatatataaaaagagtaaattatatccatatgaagagattaccaagaatgagcttcttatttccttgcacaatgtcattaccagctacattgactagtgagaatctcagttgtttaccaatttttatgacctgattgcagttctctacttttctgaatggcattctaattggaggtcttgttgcatgtttccagttaactgatcctggaaatattttgtctaacacttctaaaagtatccatctacatgcataaagtaaaaggaatcaaacacataagaacttagtgaattaataaattaaattttgatatcacattcatttaatttttcccaatcagtggataaacacgtgccatgtggatcatttggtcattatgttttgagatccagaaaattaaaaatttacacttctacagatatacaaggctttagattttgccaaaaataataaatgcagtttaagaaaaggaacacatacccattcctgacatcctcaaacagattatttacatgtgtagaaattccaagactattgatccacagtcggaagcatctctcttctctagatgtttgcacatcatctgtcatcatctcagcataggacatctttttagtgtctgtagatagaccactcctgcaatgtgtagggcactaattaaataactacagcacttaaacagattcagaaattaacatgcatatgaatatttatttaaattatcaaatagtctgcataaaattaactatgcaattcattttatacctatgatgaaacaattgtgcaacaaatgcaagattcaaatttgaagtaccctctgcaacatcgcttggggtcaggtatcttttgcagcccattctctctgcgtgatcaagaaccagatttgccctttcattggcatccttggtatccaaggtggccggactgcaatgttcaggagcaaggacattaagcagataagcataggcctctccatcctgtaaataaatgggtgtgaacacattaggataatggtttgttaatagcttgttcaatttcaaattgtagaggcaaaactctcatgagttatgacactattggcttagaagttcggagttgaagaaattgcaattctgcaggaacaaacataagaaaaattggaattggattttttgctgagtgaacaacctcttaaaacatattaagcaatatgacatggtcaaaggtcacatttccattctaggtcatgcattacacacttagatactcccattccatgaagtgggataaacgggattgttattcaagtatatatgtactaaaagcatctagctgtcaaagtgtggtgtgcatgtgtgtgtatatatgtatggacatgaatatatttatggtcatgttgcccatttaccccataagaataatatatgtgacagttaccttttaagaatacatcaacaatttattacaaaaaatatatgtattatacaaggtacaaacaaccattatttgttgtgagcagagaagccttagcaggttcagtgcaaggttaataagtaaaaaatccaaaatttgcaatgcagattttttaagggaggagaacagcagtaattaatattttcaagaccacattttaacatccatactttgaatagtatgagattatgaaggacaagtaggactgcgagacacccaagttccaacagggaaccgaatttttgtaaaagccctttgaacatcaaaaatccgctaaaagtaccctgattgttttaaatataggggcccaatgatactcatttatgcaatgtttgtacctcatataatagatatattttttacttatcaatactcattgtacaaatttatacctatcatataccttaacatcagaagaaaagtttctgacagttttctcgtaacctgctctctggagatgaaaattcatccattttagtagaaccttttcaggagacaaattaagaagctcttctatctcctaagacaacaatgaaatgcaaaatacatcagttatcctgaaacacaatgtgcaaagaatgaaacatcaaaatttgatttaattggaaataaaaattaaaggaaaaaaagcgtatgttgttacctcgttgtcatcaaccaattccacaagctgaggtgtcttcttaaggttgagatcagccagcagctgaatctgaaattaccaagagattgagaggaaaagagaacaatgactatgtaatcatttctgaagtcaaaagatatattaggccattaagaaaaatgatgtaaacatataagcaaaatcaaccactaaactaacaatatacgaatgatatgtgcagttcaaatatttacctttatgatttgggaaatcaaccctagaacaagatgaggctgcaacataaacacccaaacaataatgtcacaaagaataaaaattaagaacctaagtaaatgtctatagaggaataaggggagtgcgtattgataaaactcactcttccttcaactaagtcctgtgcgccaatgttaaccactgtgcagccaatagccttggcggaattgaggcatagagtatggttctcgtttacctcccaaagactaggattccgtttgcaattgatggctcgctcatctattgtcccaggcacagcaacattgataagtttactgcattaaacacgacatatatcaaagccaatatacattaaaggctcatacagacataagtaaaatgcaacaatcagcagaccctgcttataccacagaagaacgccatcttttgcaagatcaaatatatcatttgtagctgggtccaaaggaagatattccttcaaaaatggatcatcaccaaggtagctgtttatgtgggcaacatagcaggccttttctgattcactgatcgtgtgaagaagggtggtcacggtttccttgaggaacgatgaggagtgcctcctaccaccttgttttgtagtagctcggctttgcaaattcaaatatgcctgcatgaaaaatgtaataaattgtaaggctacataacattatatttaatgttgttacatggcgcataaactgtttcattaatacaactaacttacacataatatcccattattataagttcacaacatggaaaaaagttacctaatgtagtaatattaaaaaaagaaaaagtcaaaagcaccaaattactaacctttaagaaagcttcaaaatcaatgtcattggtaaaatcagtgcctggttcacccaagatccccctaatctcattctcaccgtacatgtctctgaatgcatttagcttcaccattaaaggcggcaaatctccaaatgtaactttacctttctgattctttaaagagacaaactacaacaacagaaagtagggtaaggtaaaaaaaaaaannnnnnnnnnnnnnnnnnnnnnnnnnnnnnnnnnnnnnnnnnnnnnnnnnnnnnnnnnnnnnnnnnnnnnnnnnnnnnnnnnnnnnnnnnnnnnnnnnnnnnnnnnnnnnnnnnnnnnnnnnnnnnnnnnnnnnnnnnnnnnnnnnnnnnnnnnnnaaaaaaaaaaaaaaaaacacagcatgaaagacaacaaatttaaaagagtaatgaaattggactaaaatgtcgattacaaggaagcaatgaaatgaacctactttggatttcaggctgcgaagctcaacctgcgtgaactggctttgaagccattgatcgtagacaataacaccctcaaattttgacatcttggagaatcactaaccaaagctacaaattgtatggtatcccccaaactacaaaaattccccagaaaagcttaagaatatttttaacacaaaacaatgcgttatgcgtacgactcaacaacctattgccagatgcaattctacacggtctaattcaaatgtaaggccaaatctacaactaatcccaaacaagaagtggtttagctcccggagccaccaacctgtccaacgttatcctgacagacaacacaaacaaaagataagcttaaaaaggaaaaaaaaaaaaaaaaaacagaacaacgatataatacacaaaagattaaaataaaataaaataagagagttcgttggattagttattgaaaaaaaaaaaaaccatcataaaaacaatgaccagaaactcaattccatcaaacacagaaaaagggtatgacgcatttcacatctatccaatggtttttccacgaaagtatagcaagtctcatgggtattgagttatttacccctccccacgccgagcaaaatccagttgagaagattgagatcgaggaagaagggaagaaagagaagaacttgagtgagaaccacgcagaagcagatacaacattgtagtaattgtatgcatttgttgaagtaaatgagtgaatgaaaataataatgagaacatacccatacataaaaatgagggtatgggttgtttgaatgctcaactaccccttcattattatttcactaacaccacaattgaattgaatgaagagaagagatgcgcaaggaagagaagaaaggatcgatttttcttagtgggtaggcaaagtgacagagaagagaaccgaccgtgtgactcccaagtcctatgctatgactgtcttgtttttattttttttattttttgttgttggtttggtttcagattgcgcgcgtgggttaaccgcgagagtatcttgaactcgctctacgcttcgcacacgtcgttctctgggtgtatagtttttttggtgttatgtggaaccgactatgtgatctcagcaaaaaaacaagcgtcgttacggcgggcatgttcatcatcacagctgggattcggtttgtgacaaagtgaacaatgcattacgcaacattatattattacattttttttttgtcacttgctatatttatattccataagatctcgtgtccaattttttattcaagcaaattactaccttttcaatttatagcatggtcaattttatcgtaattctgttatatttttataaaaaaaaaatcaaagaataaatagtggatgcactgttgtcctaaagaaattgaatgcaataacttttataataattattttaaaaattaaattaacaacaattctaattgactgataggtaccaaatttttacttataatacataaatattataccttaagaatattaaatctcattgtttttcttatcagaaatcttttgttaactttgctgaaaacaataaaaaggtgaatgatgtttgttttaaagttacataaaattgattttaaattattaaatagtttaaatatagtttttaattaatatcttatacattttattgtattaaaataaaacacatgttataattataagacttgattttgatcactattatccaaacatatgtaacttatttctaagactcgtcgactatttatctatttatcatttataaatttagagttgcaaaatataatatgcttacatgtttatataatttttttacatcaaatgttttgctacgtgtcattcttttctacaattcttccaatgactctcatttaacatcaaaggtttctataattggtgccattacactcttgttcattgaaattgtcactaaaaaaccaaagtactctgggtcgagctgcttaaatggcgtgacactcatttttgcaatttgtttgttattgtcattacaattaatgacattaattaaaacttttgtagctctcttctccgcaattagtgtattattgtcattatacaccctatgaattgaactcaatatttggataaagaacaataagaaattacagtctccaaactcattctttcctgcatgaatttcgtctactagcttcattcctttattttgagtttcagagaaaacaacataataatggagaagaaaaggaagataagcagaacaacgagaaaggacatgattgttgacaccaccaacatgcccgtgatatttgtcaccgttggaattgcagtattcgcgaagctcctcgtgatggtacagcactattcattatcatgtattcgataaagtgaacaagtgactaatgaatgtaacgggtggaagtatgatgaatcaagatcccaatagctgttggagcgtaagataaagaatgttcttgctgatcaagacaaagagtctgtttgaatacaagactaaaaatgtttttgagaatttctttattagaaaaactcttaaaaacacttgtgacttgtatccaaacaagtccaagtaatatgatccccatcagcaatatatatctcaagttccaagacaagtattacaggaatgcattgtagaagaacaaggatggatatgctactgaattacatacggcatgtgcaaggtagtgttttaagcacaaacaatttaacattgtttaaaatctcaatgttttcacgagttgtcaacattgtgagggaaataacagattgttgagaaaaatattataaatcctttatacaggttgcctcatacttttggattggagcataggtcttaaatcaacaaagcatcaaatttcaaagaaataaaaaaatatacttcagcaaataccacctttatggcaacttggtctcctcttcctcctgccaaccctctctcctatctgcaagctggggcattaactcttattagttatatagtattaaagcatccatcaacacttaatagggttgtttttgtggggttttagtataatgcaaacagtatattgtgataagaatacatcatcttcctttgtgcaatttgtcaaaaacaagctcatgagtagcttatgaaaagttcaaacttgaaaacattaagcctgttggcacttggtaaactgccaaatgttttctttatcctttgccactgaacacggccaaatgttggaatatctccacagcagattgctacacatccctaacagtatattttcattgaacttcttgcaggaagacaaggttcatttgggcacaccttagcccaatgtctcaattagaagctcatgaaagggccaaacttgacaattaagcaagctcaacacctggttaaggagagtatggcacagtctagtcaatctgccttgcctctatagatttttccattacaattaagaacttcttagtcttcaattgctttctggtgtttcattttaacacttaagaagcttccaagttttaagacagcatctgatgtccctcaaataaaggtgcagttcattttaatcaacgtgttttgcccaaaagtttgcaagtagacgtgtggtgtattagtgcctgatgttgtagatgttgcaaaggtgtttatatgtacaagaatacaaaagctcattactcttttccctccatgtctacaaaatatccagacgtctattattcctttcctctgaaacttgaaatatgtttaataaaatatttggttcttggttctgagaagaaactcaataaatgagacaccatagtaatagtcataaataatatttaaaaaatatagatagtaatgcatccttcacaacatttccgaatcagtatgagatgagtagaagtaatgtgagtttttctaggacactcaaacgcaattgatgatctagcttcattaaacaaagacaataagctatacgtgggatgaaaacatccgaagtaaatatgttcttaaccatgtcataatggtaggtttagatttcaagtttcaaacaagagttcaacagaattccatcatagtatcaaacattaaaggccccaaaagaacaaaaaagaatcaatagcaaggcaacaagttactcaggagtcacattagagagatttagcagtttctgctctatctggggtcaagtgattagcagggataagataaagatctttttttctccaagtatgttaactggagaattagagatcagattagcactaaatttagttttggcaggatggataacttagggaaaatatttgggagttcttatacatcaatgacagagtggctagagactccttcaaagggattctggacaaagctacatcaaagcttagaatatgtggaaatccaaagttctcattggcaggtagattggttttaataaaacctgtgctctctgatcttccaagttccaacctatgctatgcagtccaaccgtccatcgaacttttcttttgtcaaaacacttatctgccttctaacagttaattcttcttgttagatcacagagttttatggagatctttaataagccttttgtgctaatggttttgttaatgtaaaactagaaaatcaattagttaaggtgaatacatagataatgtacttggctgaaatacaacactagaagcaagcatagaaaactaaatagactatattagaagatgaagattcgaaatgaagtacttgaacaaaatgagacaattccataatgttaagacacaaatattctagcaattaccggtacatataaacagttttaaaagtatacaacaaccgctagtaatatataaccaataccgacaattatatgtattaaaataaaacaaaattgcaagctcgaaggcaaacaaattataccaaatgaaaaatatgacattcatattacaaaaatttgaatcagatctcccctgcaatgcaatgtgataagctttttgcccttaagttttcgttttcgaagaaggcagaaatggaattgaacaggaagttagtaacaagacattctccagccatgccagatatccactaattcattctgctacaattttcatgagttctcatccttgtcttctttttcacctttttattaagttgacctccaatcattcttacaagccattgaggctttcctattaataacacacaacatcccatgcccactccaaataccattccacatccatatcctatagccactggtttccaaccaaatccaaatttctcctctctccacaaggtcggtgaagatggagaatgttgttcacggtcattgttgcatttcattgacaatttgactccacataaccccaaatttccctcataagaatcattcaaaaaagtactgaactgttttccttgaggtatttctcccacaagatggttatgggaaagattgagtacttcaagaaagttcaaatcggttaattctgtaggaatcctaccagtgagaatatttgaggagagatccaatgattcctagtttgtcaaatttcccatggattggggaataggaccgcttagtctgttatgggaaaggttgatctctccgagtgcatgaagctctccaataacattcggaatttctccttcaaatttgtttcctgataaatcaatgcttacaaagtttttggaattttgttgagtgtcatactaatggctttcattgttacagtcacagaatcagtgtatgttccattcattatagatgtttccatgtattcctgcaaactgttacccactttatcctggacgacattcttcatggcttcaaaattttgtatgtaggattttggtattgggccaatgaagttgttggatgagatataaaaaataactaaacttcgaaatggatgcttggtctttaaactgggaatgggaccgtgcaacttattggcttgcaaaaccaatacttccaaatatggtagagtttgaagccaagggggaaatgtatcctcaatttgattgttgccaagatttaaaaatccacttctgtgcaattggacaaagattttggcaaaagaccttcaaaattggttgccattgagattcaaagtaccgagcaaacttttcttcgaaaaggtactaggtaaagtgccataaaatttgttcatctgtaaatctaatacttgaagggatgataagtttgaaagccattggggaatgatgcctgtcaatttgttgtgggacaagctgagactctgaagtaaacttgcattgcaaattgacgaagagatgccaccagcgtttgagttgaaactaatatcaaggtaatagagttggtagttccttgagaattggtccattggtgttgtcaacaggttttgagagaggtccaaataatataatgaaatcatttcatgtaaccaattgggcactcttccactaagtttgttattggacatatcaagaaatccccaaattggaacttttaccgataattttggaaattcagataaacccataaaagataggtccaaactagttaagcgggagaaactgtaattgacattggatttgaaatttagtgataattgatcattgtgcgaaagggattttttttccaaattatgaagcttggagaagagtggaaagtggacagaaccactgaagttgtttgatgatagacacaagtgagtaaggtttacaaggctgaacatggattttggaatattgccctgtagcttgttgttgcacaaatttaaagacttgagtaacaaatgccaacacagaaacaaccaccccatccatcacattgactccattctaacttacttcaaaggaaaatttatttgaaagggtaagcaaccaaagatgaatatttatagccagattaaaaaacactagatgcaagagcccatccctcacgcaaacaaacattattcatttttctaatcctttcactgcgctaacattttccattttctactctataatgtgtcattaattcccaatactgccactaagttacattgacttggagattattgtctgcaaagatgagacatagttatttgaatcgtttgatttttcatctattttggagtttctttttctttattatatatcatataaacatccattttctaccccatctataacgctatatatattaagattgtttctaacagcattagtagaattgacttggaagtcaatgggatttaggtttgatttttcatcttgaaacttctacattttttttggaaagcaaaaggaatatattaatataacttgagtagaaaaagtaacccaagagttgcagagaatttgcccataggaacaaggaaaattcctagtctgaccaagtatgcaatatcaataatgcaatgacagcatttcattgaaaagtaaactcgtttaagttgccataactccagtttgtctaacttgtaagtttctgtcttagaacactaacaagtaacaaggatcgaattagattccttattctcaatgtctttttctgataattccctacccgtcaataatttccttcttatacaatccatgtctttcattgttcaccttatcttcacagatttgcccctcttgctatttccttgaagttctagttcttaggtgcctttatggcatactcaaaatgtattaattaattttgattaaacttatttatccaatttatgcgtataattcactaaaaaaacagattaatatatttttcattgagatttataatttatttagnnnnnnnnnnataacttccaataagagtaaggtgtgtaaaaattagttttgtacaaaaatccaacttcatttatctatattaatcgagtcaattttatatccaaatagtaaaattaatttggaaaccgtttaaaaaatgatttgattttaaaaaactagttatgtaccgaagtgattttaaatcaattttaatatggttctaagatcaaaccaaatcaatgtcgaactatttttttcaaataaaaaatattcaaatgaaaattagtttgattaactgaatcgatttttagaaacaatttaattaattgaattgattttataagataatgtattatttttttcttaaattaattcgagaaaaaatcaatttgattcaagttcgattataatccgattccatcctaactaattatttttcacacccctataggaggattaaaattcagaaagtggtgcaacgtatacttggtgccttgctcttttttcttctctagtttaaggactaacatttaaagagccttccagctaaccactaatatatttttttggtgagctaaccactaatattaaaaaaacgggtaagaatactcttacatatatattattattattattattttaattcagcgcatgcaaagagaaaactcggaagagaagaaaaaaataaatgatgtaatagattaaaaaaattattatatgtatatcactgcttaataaataaataataaaaattaatgagacaaatctaaaataattaagtaatatttgtccttttgaaatagtcatggcctcaaaatcagttttcaacgtcaatatgtcataacacgataaaatcaaatatagacagataatttaatttatgcaactggaccaggtccatcatcacaattcaaattaatgaccacaaactcgttcttatctatggttagattttaatgtaataataaaaagtggtgatgaagagtaactgtatataataccacatatattctgaacataacgactttgacaaagtacttgaaagagaacgaataaaagtggtgcaatgcagtgggagcagtctcactcggcaatagcatcaaaaatgaaatgaaacccactcaccctcacctcaccaccatccaatcagagtcgcaattcacggtcgcacgttgttcttctacggtggacacccacgtagagcatttttactattcaatatatcatatttactatatcttttaataaatgaagtcaatagatttttaacataaaacataagtttttgtaaaagaatttttaatatctatatattatttaaaaaataataattttaaaataaaatctactactaaaaaaacaattttttttaaaagatcttcattaacattatataatgtaacaaaaatagttgaagatgccaccaagtattaacattagaaccttgcggtttggtgcgtttcctcaccaccaatcacagcccgccacgtataccttgccagagtttgacaaccacgttgtggaccccactccgcaccacatactacatcagtcaaaaccgcggcctagctcaagccagcttgtccacttcgccccacattttttttttttttacttttatttatatttttcagactacactattaaataacactacaatattaatacctccaacaacactaattagtcattggttccaatgaattcagtctttaaagatcttgttttcaaattttatgaatggaaagatttgatcagtgaaaaaaaaaatttaaataatatatatatatatatatatatgtaaatacacaatagaacacaatcataaatgcaagaaagaaaatactaaaaggccaccacttcagaaaaagttctgctgctgcgttaagacctcattgtctcacactttctctctctaaaagttttgaggtggttgggttcatctcttgctcctggtcttaatctgccaagtgccaaggttgccgggatgtggaattcacgcgctctctctgcgccactcgctctgcttcttcttcactcgctcctttctctcgtctatgctcagagatctacctggaacactctcagcggtaatgtctcgtgttttactaccatctttgcttctgtctcttttcacttactatttacttacctaataatcactaaccaagtgtacgatctgtgttttttttttttgtaaactttgatttcgtttgttactttgacctgagttcggatttggataaatggcttagctaagcttcgagctagtttatggtctatggagatattatatgcagtgcttagaaagagtttgacgtttctcgagagcttaatctgagaatatcatatgtgaaaaggaaacattagttatttgttgtctgggaaagttttggctgaatgaactgtttgcggattcaactcttagaatttgggtttgagcctaacccaacctcaaaagctagctagccttccccacgccaaggactagacatcttcgatgtgaagcttgcatgacttaacgggtgacccaatagattcaacaatggtcgctaggatccgctccgatacctgttttagaatttagaatttgggttgtcatattcaatcttaaatgctagcttaagaaatgagggttgcccctatttatacactcttttttgccatatcattagtcgatgtaggatcttgaacacaatttttttccatgtaatctaaaggccaatcgctgactgaacacgattgatataatgtcagagactgttgtcactttcagttttagaatatgttcttgaataacttttgcactttttattattattatttaaggaggaactttcactgtgttaggtgttttgaaacttacttgtatacttgttttgcaggaggtgcaccgttggttgtagcacgtggtggattttcggggatacttcctgattccagtgatgctgcctataatttggccgtaataacaagtggaccagatgtctatatatggtgtgatgtgcaattaacaaaagatggagttgggatttgccagccagatataaaccttgcaaattctacttacattgcaaccacttacccaaataaaaccacaagttacttagttaatggtgtacccacccgtggctattttcctctagattatactctgaaggacctatctagtgttgtctgtaagtttagtttatttcaaacatgtagttttattgctaatagttataaactttcagtatttgatggactgagtgattcttttctacggtgtatatatgtgttgttgatttaaggtttagcttctaaacaggatctttttaaacccttttctgtctcagcttgcaaatgagctttgaagttgtttcttttttctttttggatagggaagttgtttctttatatagttgctgacagtttcttgtttctggacagtaactcagggagtatactctcgatccaacctgtttgatggcaacaattttggaattcttactgttgatgatttagttaaattaccgcaaaaaccaaaaggaatatggttgaatattcaggtaaatagaatgaatgcataatccattctcatgattcagtctccttgttttaaatctaactcttgttttctcttattttttaaagcatgatgcattctacgcacaacacaatttgagtatgcgaagctttgtgctttcagtttctaggagagtagttttcagttatatctcatcacctgaggttggttttctgagaagtatagcatcacgcttcaacccaaaaacaacaaaactggtcttcaggtttatggaacagagtgatgtagatccatcaaccaatcagacttatggttcgcttttaaaaaatcttacatttatcaagacatttgcttctggaattcttgttccaaagggatacatatggcccgtagatgcaactctttatctacaaccacataaatctttggtctcagatgcacataaagcagggctagaagtttttgcatcagattttgtgaacgatgttccatctagcttcaattacagttatgatcctcttgccgagtacctccaatttgtagacaatggtgacttctctgttgatggtgtgctgtctgattttcccataactccatttgaagctataggtaagctgtttatttgtttattctgccatgttatcagaatagcctgtcacaattagaatgcatttgattttatcaaaatgttgtttacgtagatgtagggtatgcttggttgcaagagtttagaagggagacaatatttgttttatgtaaacattcaattatttaagattttcttaaataacagaactgggggggtataatcagattatagtgtaacttgccaatcatcacttattcgtttttgtaaacattttataaatgtaaaatctgctgtcatcacttccccttcaaactcttccaaccaaacatatccttacatatattttcagattttcactatatacagtatttgtcccttgggatggagttgatgcagctgtaaggttccattaaataaaattatcctaatgtcttcctaatctcatgctcatagtgtttgtgtgaatcaccttaaacgtgcctcttgcatttgcttgccttttcaattttagagtggccacggatggcttgtttaaacttcatggggcaaatcctcaattttaatcctcggtgaaattgttttaatcaccccaaagctacgatttatcttgtgaatcaacatgccagatgttgcataatcctggactttagtgatcaatctgcccaaaactgatatttataagctaatttatccttactatccaatctatgtaagcagatactttcactttgcatgagtatgccactaagattattatgcagtccttaatcaatggaaggatacggatgggatttatgttgactttgactaaaggatttcatgtccgaatgctggtgcaagtgcatgaacaaagttactaaaaatatgtacttttagccaaactctcaccacctcctgctttcaagcttccactgtaaaatctattcagcttagggcaggctcctttaggcagatcagatatggtccagttatatactctttaatcaactatagtaaaagattgaaagctgagatataagattggttggatggtaaaaggaaaagaagggaaggaagggaaagagggagaggtcttgggttcgaatccctccactaacaaaaaactaacatttaacaactaacattggccgataaaaaaaaaatgctgcatgaaagcacatagcgatgtttgccttctaggcattgcattcttattagctatcctaattagaattttctttctcaattttaaaatgcttttacatcatataagcataagacataagcatgtacttgatattagtcgcttgtgggtcctactgcatacttataaattgtaatctcagaacatgtctgtatgtttgtgttttcaatccttttttttctctatttaagtagatactgtgttgtcttcttataatgcaggttgctttgctcacctaggcaccaatgctacgaaaaaaggtaacttgttttgattttggaatatgtattctcatgttgttcttagcgatttctagttgtttgactgtatgatttttatcattcgatggaagcatggcttgcataattgatgacttgtttctctcacttttttatcatgtttcagataaaactttggttatctcaaaatatggagcgagtggagattatcctgcttgtaccaacttagcatataataaggccatatctgatggtgtggatgttcttgactgtcctgttcaaatgtctaaggatggaacaccattttgcttaaactccattgatcttatagaaggtacaacagtcgcccaatcaagcttcagcaaatttgccatgactatccctgagatcaaatctggcagtggcatatttgcattcaacttgacatggaatgatattaaaaacttgacccgtaagtctgaaagttctgtagttgttagctattcatttctgtatttgcatggagttaatccagacttgtcaaagcttaattattatttaggctgaattgcaattttggtccccctagttttccaaattcatgattttggtccccttgatttttaattgtaacatttggtcccctagttttatgaatttgtgattttggttaataattatgatttaatatgaattataaattaaataaaaattattaatcattaaaaaggctttgataaaacactattaaacctaatgtggtgttactgctggtggagtcgcgtgcgacacaatggagatagaagaggtatttgcagagaagaggaagaacagtgttgcagaaaattaggattaataattttttattcaattttttaataattaatggttttgattattttataattaacttaataactcaattaatcataattatttgttaataatctatcaggaggaccaaaatcaccaatttataagactacggggaccaaatgttacaattaaaattcaggggactaaaatcatgaatttgagaaactagggggactaaaatcacaatttagcctattattttttaaacaaaacagaatgcaaatgcatcacattagtttctttaatcccaactatgttggcaccaaagcaactaacaatcacttactgcacactggaaatacattaaccaaaaagaagaggaacataaaaacaacacatggggggacaagaaccaaacccatgaagcaaaaagcctaatggaatctataatttggcatccctactttgtcaaagcttagttgactgatacctcatgtagccaaaattcagaatgagatatatgaacattgaaacaagtcgtgttttgggaataatggggaaattagcttacaacttcactttataggacaattaatgtctcactgataaattaatatggcaaaatttcccccctcatatcttttggtgcctttcacttggctgcctatgataagtgttacaacaaatatttgacatttttctcttctctattttccctgcagcctcaatattgaacccttttgcaaaatacagattgttcaggaatccaaaatctaagaatgctgggacattgttggcattatcagatttcttgtccttgacaaaaaatcagacttctctatcaggtgttgctatcattgttgaggtgcgtgcttccatgcctattcattctttgtagtattcattctaccggctgttatttgaacatatcatttttttgaagaattaggacaaatttttgtgagaatggcttagggtcacttaagttatttaataattcatatgattgattttaccttggaataataggggaaatagaaataaggaatattaagactatcatgcattatttctatcaacttgttgcaagacctgtttctcacttgtttttgttggccatactttccttctaaatttctatataacttggccaaaagttatgaaatatactgtttttaactctttggagttctactatgcagctgacaactttctcttttgaaaccaaaaacaaaatgactcacctgccaaaactggtgtgaatttcacatcaaatatttcttcactgactctaatcaccctgatttattttaaccaagtaaagaattatttggcctgttccttgtgtgtaaatgattttatttttccttttctttcatcttcaatttactaacatgtatattgtgttgttgttcttcttcttatcagaatgcagcctatcttgcagacaagcaaggattaagtgtgattgatgctgtcatcagtgctttgagcaaagcaggttatgataaaccaggatcccaaaaggtttatattcaatccactaatagttctgtactgctgaagttcaaggagaaaaccagttatgagcttgtgtacaagattgacgagactgttggtgatgctgctaatgcagctgttgaggatataaagagctttgctagttctgtggttgtcaacaagaactccgtaattcataataatgatcaattcctgacggcctatacaaatattgtgccaaagctaaaaaatgctaatctctcagtttttgtagaaacattcagcaatgagtttgtgtctcaagcatgggatttcttctcagatgcaactgttgagatcaactcatatattgagggagcacaaattgatggtatcatcacagacttccctaaaactgctgacagatacagaagtaagtgctagcaaattctgctgtaccatgggttgattgtttcaatataaacagtttttactgaaataatttttctccgttctactgcagggaacaaatgcttaggtttgggtgacaacaaacctacttacatggaacctgttcaaccaggtggtcttttaggactcattaccaaagaattcttgcctccagccgaggctccgtttccacccttgacagaatctgaagtggcagagccacctttgcctcctgttgctaaaatagccccagcttccagcccgaatgccggaaccaattcaccacagggaaattcacagcctaaggtcactgtctgcttcttcttgtccactctggctgtgtttatagcttctcttcttctgttttgagtaaaatcatctctaaacttccttctaagaaaaatcaaaaaaaaaaaaaaaaaaatggagaaaagttgcttttggtggtctcaaccctctattttccacatctcttctaggtttgagtggcatgaagcttttggcttcagactagatgaacaatccacatttttttttgttcttcttaaaaggagcaaattctttcaatcttatttgttgtagctacgcttgtccattcttagttcctcaattgcttctcgggttggatggatactatgagcacaaaagcccgcgtggtatatatctatgaattctttttagatgtgtattttgtatcttttggtgtaagatatatttatatttaatacttgttggggtgcatttggcattagattaacaattttctcgaaaactatctagagcatatacatgggttgattgtttcaatataaacaatttttactatcccttctgattctaaatgtacttaacaaatagcgatactgaatatccaattcaaccggaaccaattttgagctggcttgattagtaagtttgaagatgtcaaaaaatttgtacaactactaagttttacttaaatataatagtaatttacattagatctaatattgcaaattagtttatgttttgtattaaataaaataaattattaaaaaataacatttttggcataattatataaatataaattaaatattttgttgatggatactttatacttataatatgataaaaaaaaaaatgtatgttaatgtcaacaagttaaaattagagaaccactaagcacatagataatgtggtgcatagttattattgtttaatccgtgtctcttgtgtttgagttttgaatatatagtttaaatacttaaagaaaaagttttactttcagcatgtagtaatatgatctgattcgagaaaaattatctttcatggagaataaatgcgtcttttaaaaataatttaaatttagagcatatttagtaacgtttgaacctgggttatcaaacgagtacttgactacttgctaaattgtaacatgcgtatggtaaggtaacgatgcatgcacctaacaaactatatttgactttactcacaatgagtggcacaaaatgggtcggtttctccgatttgacaatactaaacaaaatggtggatctttagctggattttgaattcgtgatttcaacaggcactaactacactaccatagaagattttttgactatttaaaactttttaatctaaaattcattatttaaatatttttttaagaatttaaatttttgaaattttaaaacataattttaaacaactaaaaatgtaaaattttaatttccttctaaaaagtgagaaattgaaattctatttttctatagacgctcagatgcgctccgacatgtcacgctcccgcggctgccgtttggacgcgccaccctcagtttcgttggacacccgtcgttgaagtcgcaagacaaccagtggcgctgcacctggtgctatccttggcgacaatcagcattagaatgttgtaatcgtcaaccaaactcacgttgtagaagtccaacccactggcactgttgagagtgaactccgccaatgtcgccagaggtttggcccagccaacgcgctatactttgccgaagccacagtcgacgatggcacaaaagaattttctgtcagagtcttatctgacccgaccaagacttcaagatttttacgttatttgatttgcctctcttgagggtgaatccgatggtgggaagaggcggtgaggtgctgctagagagagtaatcttggtcatattgtgtggcgacacttgttcacgatcttgaacgatgctgaaaatttaatttcttcatccaaatataaaattttgaaaataatgaaatttaattttattatcctaacacaaaattttgaaaatagaaaaatttaaattgaagcatttgaaattcttaaaatttaaaattgtgtagaattttaaattactttatccaaacacacttttaagttatactaataaactcagaaactaagaagattgtatatcttacacccacttcaaggagtctccttgaggggtgtcattacgctatctctttgttaccatagcaataatcattgtgctacttattacaaaccttgcttcgacaaagcattggaagcaatagtggccaagtatgatgggttatgttaaacaagtggaataattcactattgtttctccttttatatgaactattgtggatttgagaaacatataaatgcccaattaagaagacataaagtatgtggattactcctaaattgcactttcaatttgagttgggtatgattttggtggcacaagcttcataattcatatagtcagttatcacgttagatgttttctttccgattttggtggcaaaagcttcataattcataattcatatcttttagtgactgattcctagtagggcaatcatgataatgatagctaatacttgtgcttatcattttatatagatattttaatatagtctaatttttgcagatacgtgtgccaactgccaaggggtattctcagctcatgctgagatatgcaaaaaaatatttcaggcatcaaaagatataattaactgctactattgataaaaagtttattagtaacggttacagatactgttaatatttatttttaaaaagatattgttaatattattttataaataatgtatggatttgaaaagaacatgatatgtagataatgtttaatgaggttaattttagtgtatttaacttaatatcattaaagaatattctttaaaagattttaaaatattttttaattaaaattatactaaagtatttttaatttaccaagttaccattcacctcttgctacacattaaggttgtttctcttcttaaggagttgcaagcaaagtaaaagctgagagtgataaaatgtgtaactaaatttgttattagaatacaaaaaaaacgttgttagtaatatataaaaaggctaaaaataacattcagtggagaaaaaaaattaggactgaaaatatattataaaaaaattatgaaaaattgagatatgtactaacaatgttaataatatataacatgggattgagaaaaagagatatgcactggttgaaaaattatgaaaatatattatattctgatgagtaattgagaaaaaaaaattatgtattgttagtgtaaaaagttttatacaattatttaatcataattaattatgtatgataattttgttgatttttaaaataattattttaaaataattcaaatggtaatttatgattagatgcagtgtaaatcagtttttcattgtcaatacatagacatcatcagactataagaacatgcataattaacactagatacttactaaatatatgtaaattacccaatttcaatggtgcaatggattaagatacaattatttgaataaattaaactctacttaagagagatataaatattatgttgtctttcttttttatgttaatatagattttacaacttcaagtttatgatattttatttcattttaaaattttcttttaaagttctattaattttcattatgaattttttattaccaaaatattgtttacactatcattttttgatagatgcaaatattacattaatcatttcttcttatattaacagatacactttcctcttttgcagttttctgccttgagagattttactattacatttttctctttttactttaatgtataactttttttttttttttttctcaattactcatcagaatgtggactttactagtccatggcatttttgaatttatgagttcgattatgggacgcgtcatgcttttgttctaatgatgtcatttttctcgcacccaacattgcttaccagtttgtcacggctggtgccactgccacataaagaagaacaaagaaacaagtttcaaatttcaactaataaatgcaatctgaagattccaaggagatgcaaagaaaacagataatactaattcttttcagactacaggtattttatgcggaggaactttttttaaccatcacaacaattctttagcaagtttaattgtttcaataaagtgtcaatgtatcattgaatgattatattaacaaatgattaaatacaaactgagattaaagaatttacccaagaaaaataaagagaaaaagaaaagtcgtcggtaaataatagctaggctaattgattcagtgggaacatacctcccaaaataattgagtgtttgaacaaattaaaactattttaatttgcatagttaacattggaataaacccttatttgcgtgtagagtgtagactgtgggatttagtcttagaccgtgtttgtcatcatgaacaatacacgcacgccgcgatcaagtgatcactttattcaacatttttttccctctctttttctttattttgttgtacttaccttggatggaatggaagcataattgaaggtgactggggatttttcctagtcattcattgatctccaattgtggttttcatggaatttcgtatagttaccatatttttcataaaaaccatttttcaacgtgttgattaattcctcccacatgaggtgctgagcggttaatgatgaaagatgtgactcaaacattagtatttgttatcatgcttatgccacaataatggtgtctctgccaatagcactacacaaacatccctctaacaagtgataattgcgtgtacaattcagtgatttggtttataaagcgagaatgatgtttaaaatctcgctaataatcaagtttatctgtggaatcctttaccacaaactaacattttaacacatatatgtttagtttcacttgacagtttaataatcatgcatgcacaatctaaaataattttatattattatttaataccaaatctttatcaatatgatttttaaaataattataatnnnnnnnnnnnnnnnnnnnnnnnnnnnnnnnnnnnnnnnnnnnnnnnnnnnnnnnnnnnnnnnnnnnnnnnnnnnnnnnnnnnnnnnnnnnnnnnnnnnnnnnnnnnnnnnnnnnnnnnnnnnnnnnnnnnnnnnnnnnnnnnnnnnnnnnnnnnnnnnnnnnnnnnnnnnnnnnnnnnnnnnnnnnnnncaagatcataatttgaacaaaagtaacaaaaagtattttttttgcttaaaacttaatttgatgagtttttcaaagaaaaaaccaaatataatccataaatatgtgttttctgataagtaccagcattaacaaagttatataatatttagacatctcaacgtgattgcatgtactattttttcctcttaatgtgttttgctaaatgtttggaatttattttttttaattcagaaacaaaatatggatgagattatccatattttttcatttaaaaaatctagatatgcataattctaaatagaaatagtataatgttagaaaaaaaacaattatgaagagaaacattttaagattcagtatgaatagcaatttctttctttcttttccgttttattaaatgaccaaaaagttgtttctaagcaacacgttttttgtggaagaaaaaaaaatgttttgaacattaaacatcaagtataaaaaaacaaattataatcaaacaaggagtctctaataattaaatatataatgtatgaaacaatggcacctgattgctattttaagccttcaacttaaactcaattggttccaaaattttaaagtactagattttaatttgattatgaagataatcatgaaacttattgttgtttgaaatataagagattaatgtagtaaactgaaatttattttttaatcgactgatataaaatattttttaatcatcaattgtgatataaattatagttttgttcactctcatattgttgttatttagcataaaactgttgcgtcaataaaatgatgcgtaacttacggctggcgcgactggcaccatattccagtacttgtggcgcgatccgcgcgagaatggcgcgatccgcgtggaattccagtgggcctggcacgatcagcgtggacctggcgtgatccacgtgaacctttagatccaattgcttcttttattttgcttctttgttccatttattgctcctaaacattaaaataataaaaattaataataaaaaccaaaaagtaatgaattttaactttattctagcatttatttaatattttctatttatttgctaataaaactaacctaaaaactactatatatttgcagtatatcaaaaaccattgagcatataaacatgttatcttgcctctgtacttcttatcttgatcgatctcttctttattctcagccttgagcttgaaggttgtagttttcacacctcgtaaccctgcttatatttgattattgactccaaaaaaaaatttaagagagaatgagaagaaagaggagaaaaatatattctaaaataggagtataatatattctaaaacgtatagatattaatatattataatatacacatatacacttttcatattatcttctatcattctattattattatattttgaaaaatattaattaaaaatttaattatataatttttttatttcgataattatatatactaataattaaagttttatatactatcttgtgtctccttaaagatggttctctatgtaatcgcctacaccaaacacgctttggaccactatttcttgacccatatctcacattacttcgtcttgcatttttagtcataaatcaacctttttttcacatggggattgatttgagaacctttttaatgtaaggatcaacttgaaaatgaatatcaccgatagcaacaaaagttatattttaaccacacaagtaactctttgcatcattttttgtactacatatagaacaaggatacatcagaaattaaaattataattaaaattatttcatattagttacgattatatttttttctgtaaatatggttaagcagtttttttaaaatatatttatatgataaaagccactcctcgcgttaaaaaaaaaatattattctcaaatcacattttaagtataatcgaatcatttaaaatgtctccagatattgtttagtataaatgatatgaaatattattaaattaaatttatgccccaaagttcaacatatttatttataattaatagcagcttaattattaaatcaactaatgatatttccatttttatttttgaatgaagatttttcattttgagtattaaatttaactcataatttctttttgttattattaagtgtttatgcgtagttcaactaatttacctatttgtttctgtgaaacttaaccttaaccttatctataatggaacaaagagattcgaaaagaatatttttaatactttgacaccgagtataggacaaagaataaaactaaaaagaaaaaaagaaaaagaaaaagaaaaaagtactcaacttttgaactatttaaatttaattaaaaaattataagaaagagtaaatagacaaacaaaaagaggccatacccatttccccgaaaattgtaaagtagaacaaaatgatgaagtgcgaaggttgttaaaaacaagtcaagactttaattaaccgattgtgaaacgtgggtgatgtcaattgtcaagtgaagatgcagagacacaaatccatctaggacccaagatttttttttttcttcttctttctcttctgcctttatataatatttatgagccttaaatttgatttgaagagaaaatcacacaattcaacatgacaggtggtaatcatgtaacaagtaagatactatatcatactatatgaattcaaaaaattcccaaaagtcctatgcctattcctatgaaacatagcacaccacatcacacatcatgagtgcgttatgctgacgttcataggaacaaggaaagaaaaaggaccttcagctcaagcaaactcttattctattctatgctatgacatcaacgttttgagtttgactttccaagagtgaacctcttcctctctttctcacgccacaccccccactttcctatatataccttcaacaatctttgtcttgctcctcacatttccatcattccataaacttttttctttctctctcttttgcacttctttcataaaatgccggaccaagctatttgcagttgcattaatgaaccttgtcttgtagccagaaagttcttggccagacctcagcatgagggtgttggagccgttgttagaagaagcatagggaggtaagacttaaagagagatcaatgataacacagttaatcttagccttagccttagccttagccattatgcataattatgattatatttaactaagattaatttggatcctaaggttgaaaggtgtagattaactttatatgtgtatagtattgcaagttgtttaaaagttgacctttttgaattgattggttttgtgggtatatatgttcagatttgaactcaagtactttgatcctttccttgccttggatgaattctcaggtgggcatctctgtattttcctctgtttttttattttggattatgaaaaagtatgatggtcaatcttgtattgtattctaagaatgtgaaattctgaaatattgcagtgactgctcctgctgggtttcctgatcatccacatagaggtttgccaattggatcttctgtgtcatttatgttcttcaacgatctgatttgcttagtttctgacttgtttcttccttgtggtggtttttatttttaacaggatttgagacggtcacatacatgttgcaggtagagcaaatatttattgttttagttcatgcgcttttcttcctttgatcattgattataatataaaactgttttccaacattagagaaaccacgttttgagttatttcattttttgttccaatccgtgttataaagtcaaaggcgtataatataatggccattatgcaaatcaacaaaattgaaaaacaaaaaattaaaagtaaactaaatactatttcgctttatgatttctttattctatattagctcatagttttaattgagctaagtatcagctcaatatggtgttaatctttgtgctggtggtgtggcaacatgtaagtcacaaattgatgattcgttaccaattaagattaggaccactaaaaccataccatttaagattgtgtcctgattgcaaatagtagttggttataagcacaaacacaagagtgaccccacatgttgatatcttgtttgtttttctagaatgccaactaccacttgagtgtaatgtaatgtatctaaagttgtgtacgtgatatattggtcacatatgcttgtgctgatgtgctagcctcacctgaatgcaacttttttgcgcaattcagggagctgtaacgcatgaagattttgaaggacataagggaacaattgaagctggtgacttgcaatggatgactgcagggagagggatagttcactcagaaatgcctgcagctcaaggaacccaaaagggtcttcagctgtggatcaatcttgcttcaaaacataaaatgtaagtggacaattcttctgtaccaatgttagagacacttttcaataaacaacttaattaaatacttattgcccttacaaaaattcataaatagtaaacaacttaattaagtacttgttgaacttacaaaaggtcataagtcttttttatgtgtatttggatatgcatcaaatatatatatgtttatgaacaaaatcatttcaaatgaatgaaaaaacacaaaagttactattttttgcttcaggatgacgcacttttggagtgggcacaaaactaaatatatattaaataatttttttctagatatcctataattcatttatacctagtattttaattttttaatgtaaaaagctccaaataagagtgaccaagagttatttttttatgaaatactcaaatcgcaatcttagccatattagatgacgtactttctgcgtcattgaagatcatcattggtttgggggataattttgaataatgctcatcaccaaatatcaacgagaccgaaaggaacttcactctttacaaagaaacagtcaaatcttttaaaactttctgaattaagatatgccttcctcacttacacatgtgactttttcctcatgattcgccatcatgtaccatttcctagaagtgctcttaaatagggcatcaaaagatgcaagtgtgcaaaagggacttaaatgcccagcataaagaatgtgcctctcaccccatatatcctatagtgatggtggaagcttcaataataagagcaataataacatgttgccaatgctagttcaaaatttgtctggttatggatgccctactataaatgaattcaacttttccattagtgtcttcttggaagtactatttgttatcctttaagaagaatttattgtctaccttgaagtttacgttaaattggtaaagtagtttcttcatttagactctaaaactttggtttaatatgtctttgtactattatcttataggattgagccaaggtaccaagaaatgttgagcaaggacatagctgaaactatgatagatggtatcaaagttagagttatagcaggggaagctcttggaataaagtctccaatctacacaaggacaccaaccatgtacttggattttactcttaaacctggtgctcacttgcaacaacttataccaaagtcttggaatgcttttgtgtacatattggaaggagagggtgtatttggaaaccaaaagtctcaacctgtaacctctcaccatatacttcttcttggtcctggggatggcctagaggcatggaacaaatcttctaaggtccttaggttcattttggttggaggtgaaccattgggtgaacctgtggtgcaatttggaccttttgtgatgaatactcaggaagagattgaccaaacaattgatgattttgagaactataccaacggatttgagaaagctagacattggaggtctgaaagtgcaattagccttgattattgattttatttaatgtcacatttgttggttgatttgggaaagatgggaggcaaaataagttctgatgtatattggaatgtatgaattaggcgaagagtttctatcccttttacctttatatttatgtcaatattatatgtatgcgtaaattaaaatccacatgtagtaagttaaaagcagagtaaaattctagttagttaaacttgttatttttactttttttttttattgttttttagtttctcgttataatcctttaaaaaaacctgacacgttactcaagataaactaaatttcttgccatttaaatccacaggtgttaataaaatcctttttatccttataccatatctaaccattcatttccattttagtaaatcgaaagagtagcgctaggaaaggaataataccaacatattctttgataattaacattttttaaaactttctagataaaatttcacttgtctcactcttatttaattaagtaagcgtaagatcgattttactaaatcatagagtttataaaaatatatattactatttccattattatatatattaatgtttagaaaagacatatagcaaaaaaacatgtttagaaaagacacgggtccatttgaaaaataaaaataggtgaattgacatataaaaaaaagttgaataaaagttttccaatcttatagatagaacaaagtgaacaaaccatcaacctataactttccatgaaattacaaattacctgccgagaatgacataaagtgcctttattttaggtataaaaaagttttacaactatattacccttttattaataacgatttgaggtgattgttaacgaaaaaaagtctttttttctatataattgatccattaagtgactgatacagtacaagcttgtggaattaatttgataagtacccctggtattataatttatattttctctatccatatactatcacgattaaaacttacgaacattttaattatttaaatttgatatatgttcatgtaatttaatgttaaataaataaagttgcattattaggggaaaaaatgaggctcaagttgttgattagtatgctcaattttaggaagtgaaaacgatattacatttaatttatttttttatgaaaagatacttatattatttccaaatggatctattcagcaacaaccattggtaaatcaacacatatatggggatcaacatacgaatttgctgccctaactcggtaataagctgtaaaattcgtttgtctccttacaaaataaacttgataatttggtaaaaataaactgactaattataactcccagcctcacaagatgtggacaacttggccaaaagtttacaaacaaacaaacatccctacccatgaaaaaaaccagtgatatcatgataaaaaaaatgaatcaatatctcccaacacccaacccctgcatgataatattatgcatacagcaaccaaaagatatgcgtgaactgcagcaaccatatttgtttgatatacatttccacgaaagaagcttgaccctatctaacagctctgtaacatcagacttctttgcagaaaaaataagtttatttctgctcttccataaaacccaacatataccacgtaccatattatccgccaaatacaaatctgttttctattacttaacaccaaagcccccaaactgcagaaaatgctctttgattgtcaactgcaatggttctgtactcctcaccaatccaaacataaacgccatattttattcggattgacttaaataaaattatcaaggattacaaaattttctttaccatatatttaatgtcaacctagagataagtatcaaataatctatgcactcacttgtttgtgttattgattattttgtattatctattaaaatattattcattgtaaatattttatcatgtatttataatctgttaaactatggagttttaatcgttaataataaataaaataatttataagtttttatattaattataaaataatctgagtgcatttacttaaattcgacaccttgtagcttagttaaagaaagaacaactaatgtcacatgatgttttaaaagtaaagtcgtannnnnnnnnnnnnnnnnnnnnnnnnnnnnnnnnnnnnnnnnnnnnnnnnnnnnnnnnnnnnnnnnnnnnnnnnnnnnnnnnnnnnnnnnnnnnnnnnnnnnnnnnnnnnnnnnnnnnnnnnnnnnnnnnnnnnnnnnnnnnnnnnnnnnnnnnnnnnnnnnnnnnnnnnnnnnnnnnnnnnnnnnnnnnnnnnnnnnnnnnnnnnnnnnnnnnnnnnnnnnnnnnnnnnnnnnnnnnnnnnnnnnnnnnnnnnnnnnnnnnnnnnnnnnnnnnnnnnnnnnnnnnnnnnnnnnnnnnnnnnnnnnnnnnnnnnnnnnnnnnnnnnnnnnnnnnnnnnnnnnnnnnnnnnnnnnnnnnnnnnnnnnnnnnnnnnnnnnnnnnnnnnnnnnnnnnnnnnnnnnnnnnnnnnnnnnnnnnnnnnnnnnnnnnnnnnnnnnnnnnnnnnnnnnnnnnnnnnnnnnnnnnnnnnnnnnnnnnnnnnnnnnnnnnnnnnnnnnnnnnnnnnnnnnnnnnnnnnnnnnnnnnnnnnnnnnnnnnnnnnnnnnnnnnnnnnnnnnnnnnnnnnnnnnnnnnnnnnnnnnnnnnnnnnnnnnnnnnnnnnnnnnnnnnnnnnnnnnnnnnnnnnnnnnnnnnnnnnnnnnnnnnnnnnnnnnnnnnnnnnnnnnnnnnnnnnnnctattttaaaattagataatagctcggatatataattcttatattaagagatggaataaaagagaattgaagaccaacataaaataaattttttataaatatgtagtgacaagttagattttataaaggaatcaacttgagtggttatttaattgcagctaagtgacaaattagatttttataaaatcaactagagtggttatttatttgcagtgacaagttagattttacaaaggaatcaactaaagagtttctcaccgcaacaacttccgtcgtctatgagacacagaattatcttgaacatgaaattgccattgataacaaacatcagtgttaaaataacttatctatgtttatttttgtggtggtcatttgaaagactaacaacttgagtaaatgtagttgacactattaattagatttcagttatctacatttcaatcacgtaatcaagttgcatttgtaccaagattgataagatatgggctgttgttagaataaatggatattcaagtaaggattcggtgcttaaaagcttttgaagtatatttccaaacaagatcaaaaagataattttctaattaaaaatcataaatttataaatgtaacatgtataaccagaaaaattccaaaattgcatagtttaactttcaaacaaatatcgctgtcacctaatactaacagttattatatttgtaagtgcacgggtcaacctaaatcagtcatcatagtccaagttcaacaaaccacgaacatgtaaacaatcatgtccttcgacaattgttgtcacccttaagttcatcaaaaaagaaatgttgataaacgctacaaggaacctacaaaagtaaaaggccaagagtgcacatcttatctacatgatgctagaaaatcacgataccccaatctcttatcgagatgtaggatagagtcccttgctgcgcttcttcaaagaatcggagaaaaaggagaacgcatcttttagttcatcaggaagagagagttgaaggggcactaccaaaggcgaacgtgcattgtgttgcacaggttttttacaggatatgggaacagcaagtgctggttgctgcttgtttagtccttccatgataaaagaaaatgccccaaaagtgagacagctctgcataagagcttgtggtgcacctgtaaaatcctagaatataagtcctgataacaaaaagtatacaaaatgaaatttacacgtatatttagctaaacaatgaattgaattttaacaatatcaattattggaaggcattctgcatcagcaaatttcccccctcctccatattaggtgatggtttgggggaggacaactctgacatgtgtcttgatgatttgttgatcatggattcaaatctagaggataagattgagtacaatatctctaccccttaccttcgcatagtaaggagcatctagataatagagtaagtagttttttttttttttaactcctttatcctaattttttcttacaagtttcaaagaaaggacgaacttatcaatttatttaaataaataaataaaagatacctggaaaacttagagcaagaccagtgcaacatccagctacacccgcattaatgactgtagatgcaaaagaattcacattaccagagcttcactaaaaagcaaaagtgacacattttataattaaatattcataccatcatcttttcctcgaagtcttttcaagatgcaaacaaccaaactatgaactccagacaaaactgcaaatgtctaatgacaaaaagaacaacataattaattgcaagctcaattgaagcacaaaaataatgacatatgaaccaagttcccaatgtaaaacaagcaggaaaaaaaggcagcgagattctcaatgtacctttgcataagaccctgcttctacaaaggatcctttaaaacctttcttcttaaacaatccagcacctgaaacaaaccatagcatgcatccttaagcaaaatcagtaaatcttcgaagaagaattcaagcactgaattcacaacatactatcgacagaaacagtaaatctccgattaaatagttgaacgaagaaattaggcttaaacagtaattagtccatgaaacgacggcgtaatgcgataatacggagaggagaggagagaagagaagaaccgtatccaaaggtggagcccatgagagcgccgccagcggagtctgtggcaaagcggaggaggcaaacggcgggagcggcggggacgagggcgttgggagaattggaatagggaacagtgtcggaatcttgagtctgagtggttgcgtcagaattcggcaccgccatagatgatgaagacgttgaacctctcttctgtgtcttctgcctctttgggtcttctccttttgactctattgtgtgcgagtgagtgagtgagtgactgatgttatccctttgcaacatcctccacgacgtcgttttatcccccttccacctttttcgttctttttaagttttaaccataaagtacattttgagataaaaatatttaaaaattaagttattataatcaaatgctccctccgttatattataattatcatcagaaaaaattatttttaaataattattattttatttttaatataatattagtttttttattttattctttataatattaattaatgacgaataacaaaatatataaaataaattatgataatataagattaattttataatttttatattatttttatttatttattattattttagtttatataaaataacctagaataattattattttgagatcgagagagcactacatgttatcgcttagagcttcttttttttnnnnnnnnnnnnnnnnnnnnnnnnnnnnnnnnnnnnnnnnnnnnnnnnnnnnnnnnnnnnnnnnnnnnnnnnnnnnnnnnnnnnnnnnnnnnnnnnnnnnnnnnnnnnnnnnnnnnnnnnnnnnnnnnnnnnnnnnnnnnnnnnnnnnnnnnnnnnataatcactgtcatcaattaactatttaaaaatatttagatgttaaatgaataatttatatcgaataagtctcttcattaatgaataatattaggaagtttctcctgcttttgagatgatttttatttataaataaagtgtatttaaacgagattaatatgaaaagctttttttctcccgtatttcaaaagtttttattataaataaaattttagttatgactgaaagctattgaattatttttccaaaaacttttattttcccattttatctttaacaattaattatttaaaatataaaactaattagcatgaaaaaacttcattcccttgcctaaaatatactcattctcaatataacaaaaaacattaatacagtatttttttaatatccttaacttaatatagccttcataatattttaaagtataccatatttgtgacttgccttggtttttgggtacagatttgtgtgagttgtgtttgtatccgactatccgttcaaaacaatatttcctcaaataattcataaaaaaaaatctgtagcttctgtatttgccagcaaaactcaagcggtaaagaacaaataattcgatgttattacttttacctactgtcagtacaaacagaaaagaattcgaactccacaaaccaagtgctcacacagcttaaaaaatagaatgaattttaaaacaacacagagaatataaatagggtgtattgatccaagaaggatctgatgctagacaaacttttggaagtttgattgttaaactcatcaattgttaatcaatccaactaatgtcgaattaataatgctgttgatagattgctccaaactctactctccatgcctgatcatcatgggaagttgcatccttttgaacatcatcagaatcctctctatatagtggctgcagtgcagactctggtaatttgctctctgcaaggtactgtttcatggtaacaatctccatcttgtgttttcttttcagcttatccattttcttttttagcttttcattatcttgttgcacttttctgaaattctcctgtataagaaatataaaaatcaagagaaaattagaattgtccgaaatggatcatcacaaaatcgttttccacaagtcctattctaatatctattgattttagagagggttgcgttaagcataaggtaatgcacccccaccaagttagttcatttatcaaatgcatttgaaaaaattgatgatttttacctctgcaacagacgctgcatgctcagcttctcttagtctgacaagtagttctccagcagcatgaacagcttctgcagtttctctaagttgaatcttgagattcatgttctcctttttcaagaattttgcttccctttctctctccaccctcaatgcagaaagctcagcagcaagagatttggcaaagcgagcatgtcccctttttccagcctttgccgctgctttcttcacctctgctatgccttccattatagcattgtgctttgcagccaaatcattatatttttcttggaggtcggcatagtgttccaccattctaccatgtccgagaaccgctctttttagtgcatcgtctaactcttcagtgcacttcttctctaaactcagttccatctctaccctctctgccctctgacgaatggactcaagatcaactcttagttcatcagtaagacaaatccactcactttccatttctgtccatctctccctctctttctctagctcatcaccattatcaagagaaaatacaccactttttcggagttgaatggatcttgccattaatgataaggatgatcttagtttgtcggtggactttttaactggtgcatcactacataattgcatcctgcttcttagattctgaatctccttaagaagttcttccttctcagctgcatcgaaagagctgtctctttgatttacgtcttcctggactcctttaatttcacaattttcctctataatatctggtaaatgcctgtctaacgaagttccccttggtagctgcaaacaacataaaaggtacgttaaaagggcgagttccaaacattccaatggataggactttatattgtaaattacaaaaccaacagttgaccttgtcttcatctttcaatgagttatactcttcttcatccctagtcagtttattgctttctggatcatacacaatgatggaagattttacttccatttctcctttcaatttctccacctggacaaaccaaactaaattgtcagtaatgtaaaatttacaccacagataattcacgagggcatgacctccttataccaattgatttagttcttcaattctagcagcttgcttcttgcaaactttctctagttccttttctctcgagattgctttatccattatactctgtgaatcctttaagcaaaaaaaaaacaaagataaatcagttttacaagaaaattaatcacagaactttctggaaatcgtctataagacatacgtttggaaccttatctgtcagtccatccggatcctctgcttcagctgtttcaactcttgactttatgctatcttgaacctcagtagaatcctgatcgtatattcttttaaggcaagattcgcaaagcaagctagcagttctttcatcgacagaatatatcttctgttgcattatttgatcacaagaatcatccttgtcttctggacaaggtgtcaaggttaagcactcaaaagagaaggaagttgaagatttgtttaatgctgagtttcgctggtgataatcaattatctgcaatcccctctgtaggcttgctgccaaggattcggtaggaccttgaaaaaccttgcttgaccgtagtgacgatcgcatctgctcaccctctttaaatgattgccttaatatatcattactggaactcatattctcctctgccacattgttccaacttccaagacaacttggtgaataagccacacttttcctctggacattcttgatttttggagactccgacaactgtggttctccaagtattggagaccgactacatgagctaactgaaatgctatctctgaatgtagatttaattgtccttgaggcattagctgtgcatgcaaagtcatctgctgatgcatccaaggtggtagtagatccctcagtttcctcgggacatagcttactcattgcttctccataacatacttcctctttttgaatttcatcaccactggtcatatctgtgtcacaattttccgcaacagaataatactgggcacaatcttcactgacagatatgtttttagggttctcttcacacgaatgatacaattcatcaatctgctggcgtaatttccttatgtcttcctcgtccacatttacctcttcatcagtgtcattatcaatgcagggtaggagtagagagcggtttaagctgactcgcaactgattaaggctgtcccgtacattgcgtacttggaggtttccatttttactcccatctgagctatgaacctcagcctttgctctaataagttcttcctgcaccaaagcaaacacataattctttgatgtcagatctgtatcaacccattaaaaactatgtcagtgaagtcctgaagataaataataccttcagtttccggatttgatcacttaaatcattaacatcctcctcctttatttcattgataacaggttcatttctaatggttcttactcgctgtccaaacctgagagtgcgcagcgtttcaccataattcctacaatcaacaaatacaatctttaccactagaaacaaaatataagatgtccggcatacacatgaataggtaatgctcctcagtccaggtaaatacttgttatcaggggagatggaacagattaatgagagtttggcatttccaccgagtgattcttgtagtaaacgagttaaacaggaattcctgtttgaaatttcttctgctttttctgagtgagtttctttagtcagggcatctactaagtgcctacagcagtgaaataaaatagtggttacaaagaagtaaaataaggacgggataacttcacccattaaataaataaataagaccaagatattgctttcaaccaacactagatgcggtcctgtgcattttgcacggaagagacaaaaaaatgcaataaacggttaaaatcacaaataacaaaaaaaaatagtaaatggcatgagccaggaatggaaatcaagagaagccgcgtatgtgttgccaggacaattttaataaatatttggataactgaaaaactaccaactttagacatttgtatctagtcatgacatggcatcttacccaagctgagataaggacttctttacattcttgtcttcctttagacattgcttgcctgcatcctcaactttgtttctgtcctgtccagcaagatcaataaggctaattctgctagattttgaactactgaaaccattttttgatattccctgcagcaccagtaaaaannnnnnnnnnnnnnnnnnnnnnnnnnnnnnnnnnnnnnnnnnnnnnnnnnnnnnnnnnnnnnnnnnnnnnnnnnnnnnnnnnnnnnnnnnnnnnnnnnnnnnnnnnnnnnnnnnnnnnnnnnnnnnnnnnnnnnnnnnnnnnnnnnnnnnnnnnnnnnnnnnnnnnnnnnnnnnnnnnnnnnnnnnnnnnnnnnnnnnnnnnnnnnnnnnnnnnnnnnnnnnnnnnnnnnnnnnnnnnnnnnnnnnnnnnnnnnnnnnnnnnnnnnnnnnnnnnnnnnnnnnnnnnnnnnnnnnnnnaaaaaaaaaaagacgttagtcttccatggctagtcactttaaatacaattatagtgggcaataccttacaccaagattcaatcacaaaagtgaaaattatatgtgatctagagctcttagaatttaagcttgttgttccaacttttctgcttgaaaggccctacagcatataaagaccaaattagctaagctgataaagtataaatagtatgtagacatataatattcaacaatatatttcctttgatgcttccgtagtccctaccttaatcagaatttgtgttacatcgtcatagctagtgacatattcctcggtcagattctctatatacaatgcatttttggagtcatctttcatctgcaataatttagaccagccataataagcatgcagcaatggaaaactagtgtattagtcttttatgattaattgtagcacaaaaggatggcatatgcatgcctcaaggttccgctgggttggatcaagtaaatccccaattttttcgttgtatatctgtttcaaacaacaaatgaaaaagaaacaagatcattatcatacaaacaaggaagccaaaatggaaagttttataaagaattacctcaaggaaagaacatcgacattggtagttgaattgtttcccgtcagacacatgctgctcctaatatagtaattgaaaataaaaataaaaaatagtcaaaaatataagagaaaatagatttagtggttaaagcaggaagtaaaacgtactctctccagctcagaaaacaacatttggaagatccgaggaacaattcccttgtgacttttgggcgagggctcctcaaacatggcacttgggggaccccacattgtataagtttttccacttccagactagcaaagaattaaaagaaaaataaaaaaaaaatccccaacaattaattgtcgaacaagaatgccattttttctctcactaaaaggttaaaataatatagcaaacatcaagaagtacctggccatatgacagaattgaagtgttgtaaccagctaaagcattcttaaccaaagggacaccaactgactgaaaaatatcttcctgaacaaacaacagcttatataaatcacacttatcttatcttaacagcatggaagcaaataaaatgaactattagttgcttcattcacaaaagcaagtgagcaagtcatataaatagtaagtatcataatcctatcatagaaaattatttaaagttaaaaaaatactagttgtttcatttataaaagcaagtcatataaatagtaagtaaattaccttaatcctatcatggaaaattattgaaagataaagaacataaatcacaaatagcacaatgaagtgaagttatttacctgattggtgttcgaatcaaaaactgaatcaaaggtaaattgcctatccccaacacacaaggtgtcagaagaaaccttcttaacagttcgatctccctctattccattgttattcttaggtctgatccgtactacaacctgtttcagaaccatagtataagcaaataagaagcagaatttttttcacatatgacatacccatcttcagacatacccatcttcagactcacagataacaacttcaatgttcaaaaaaataagcccaaaaagagagaaaaattggcgcttaccttgactgatgggtcggattcaagagggaatttcgattgtttgaggttgttctgagaaagtgaggttttggactgtgattgtttggttgtggaaggcaacgattgttcatggttgatctggatgttgggatcggtggggggagtgttctctgcatctgaatttgggattttagggtttgaaatggttttgtgtttggaagagagtgatctgggaagaaattttttgacggatgaggatgaaatggtgccagagaaacgagtctctgcagtttctaagttactgctttgtctcatgtttatggtttcgctgagcaagcaaacaatttagcaatgaagctatacacagagagagaaagagagagagagagagataaacacagaaagaatgagagttttggattcaaacgttgatagagtcaagacagagaagagaagcaaagtttttgaattgaggaagtttagatgaccgttggaagaaggataatagccaatgaaatgaccaaattatcctttctctttcctaaagacaaataatggcttcaaacaaagaaaaaaaaaaacatttaatttaaattgagcttttgttgtgactatgatttttatattcctatgtttttcttcttctttttttttccctctggatattataagggtaaaacatctcaattatacaatttggctgcaattgaaagaagaattccgtagtattaatatttattaggacgagatgagaaagggccagatatgtcaggaaattattactctaacctattcatgtaaagggtgtaagtatctaaataggtcaatattaaatctaccatttatataaaagaagatttgctgtatgtcataatgtgacaatcttatatttattttcttaaaaaatattcaataaaattattttatttttaattgtaataaatataattaataattaattgtaattaactaacattatataacatatttatgctaataaattaattattcaatagattgatgttaataaattaattactaagcacattacaatatcaagaagaattaataaccatgttatatgaaaaaaatcaatactaataaagtattgaatatatttaatttctaaatttattatatatctttttacaatccaaatttattataataaattacattaactatcactttaataatttaaaattaattcaatcaaataaaaaaattgtcattatatttattctacatgtgattttttttctctcttctatttttcagttttattcacattccaaagaaaaattatccataaaaattgataggaatatataatcaatatttattctaattaattaaattctgaattgtcataacttttaaaaatctgtattataataaattaaaatatcaattaagtaatataattatcaatttaatatataatattttgttaatattttaaatttaataaaaatataatgttatactacaaactttgtcgacaatctagtatcctatactaaaaaaatacatatttaatattttaaattataatctttatattaacataaatttgagcaacacacgaatatcatatttaattaattttggtctcttccacacacacataattaaggcatttgcagataacatgagcttacaattcagactgcgatccctcttgaagcacttaactttaggtgaatgattttgtgatgactattgctccagttgccacattgagaccagcatgaaatgcaaagctttctagctttatccacacactcaactttaaacttaattataacaacagcatgcattactcttgtgctccctctattttcacacacacaactctacttagacttgaatagaggaaaactatagataagtttagacaaaaactttaaattaaacgttttttctgtggtgttttgggctgggaggaaaagttagtccaacttgaaattaannnnnnnnnnatcacggaatcattttcttatatttttctcttacacttaggtgtctaatagttttggatattcatttatcttttatccatataaaagatatgggagtagttaattactggctggtgaggcatgagtatgtgctattcagaacgtagtttgattgaaaacgataatgggaaatgaacagtatttcaatgcatccttactcttacgtatgatttcaatttttcaataacagtgtcgagattttccaacactttttcagggtttaccttttatttggcacaatagcatcaatccacctgggcaattacgcaaaattatgtaactaaatgtacaaggcataactattttttcaactcacaagccaacatgattagtttggaattattgaaattaaaaagctcgagtttagtttccaccgtcaacaatttccttatgataagaatcatgtggttaattagcgccgaaattaatagcatatcttctgccattaagtgcatttttaaatttagttaagagaaaaaaaagtttttttactcttaaaacaataatatttttttcttcttaattttatgcattagaatccataaaactagtttctaatatttatccaaatatatcctgattgggataatctccttcaaatttttcatcacctcaatttttttttatatgtgagaatcaaaaataaatatcaaaaaatttataataatttatagatcatgttcaattaaatgaattagaattcattgatacaaatcttttgacatctcaaaataccgaaaaagaaaaaagaaaagaaggaaatcagaggctcgtcctccatacatacatttcaattctatcacgagtcaatagtaatcgtagtttaataattacgtaattagctttccagaagcttatatcatttttctagaaatggtacaactcactgttaataattgactatgccatttgttcttatatgcaatgcaacagcgaattgcaacaatcaaaagtctcacatggtacccacatgtccttccaatccaaaaaattcaaagatattaaaatctattatattaatttagtatttctgctatctttattggtcaataattttcattaaggtgtctaatatgtgaaagccttgtacgcaaattacggcatccatataccgactatatatgtgaaggacgaaaaaagggtatttgatgagcaaaagtagaaaggcacatgaaagcactccaatgcacatccttccttaccgatccaaaagagaaagtaaaaggggaaaaaagagcatgcagattgtcacggatctcactcacttagttaaataaatatgtatgagttgttgtaaattttggtaatatctttcatttctattaataaaaaagaatatatagatatccatcttaatttctattattattattattattattattattattattattattattattattattattattataataggggacttgggttgggattctttcacgacacgcgtcacatttaggaaattaagggaaaatattcaatcggtgaagggcacgagtagttaatagtagtgggtcacatcttattttagaactgaaaaatctataatggatggaatatttgataaatttcaagagatattctccgataatagacggtatagtcctccgaaaggtacaattaactatgatagtttgataaaaaaaagttggtaatttcttacaccaataaaattatactatattacgttacccaactttagaaaaagatcaacatcacaagcatctaacttttaagagaggatgatccgagtatttgggaaatccttttttaaaattagtcgataaaatatacttttggagtcatgattttttttctctcttttaaataagaccgaagataatatcatttattatacttatataagtatgataaataatattatctctgttacaacttacaagtcagaacaggtgatagtatgatgaaaaaagagagaaaaataagagataaagatagtgtattcaaaattatgagatgtccaaatattattattttattatgaatagaaaaatcaaattaatgacattttggcaaccacaccatagaacattttctgaaatattttcgaccaactttaatataccttaatttatataaaaaaaaacatatttgttgatatatataaaaataaaataaaaaaacagaactaacagttaaatacttcacccaacattccatattactcaataatgtgggactttgagacccataacacccagattccttatcaacacatcgtggtttcagttgctatatgctattaagaatgctttatatatacatagatagtgctcaagataaattattgtaggagaaagaaagtttaacaagtaaatacgaaataagtaacaaactgacaaaacataatttctttgaaattgttttacaaaaacgtattcacgccatttaacttctcttccaaagacacaattgagggttgttgaatagtgaactagtgacgcccctgttgtctacctccaagtcatttttcttttcttttaaggtgatacctctaagaagtcattttgagctgatgaacaaagcagaagaccccaccatgattaatctttgatttttatgtaaaactttggtgcaagagttgcaaaatacatcggggaagcatatgccatgggacccacgaatgaagaaaacgggcaaatttctagaacaaaagtgcaaaagctcttctcataagtgggcgaccgatggtatcatgcgaggaaatctctcatgttctagactccttagataacatcaatgcatttcctgcacaggatttttgatgatcaaatttgacttcatatttttcttctcataaataaatgacacagaaagagaaacaccaacaatgtgaaattgctttacgtgattataaatgaaaagaaagagggttaattgattatttcttgatatgtagttgtaactctataaacccaagactcgagtatacgtaattaaggtatttcagaataacatgaacctactggctgagcaacaatattatgagactgattgattgttcatgtcatcaaggtaaagtcgattataagggtcttcatctatatagccatcaaattcaaatcttactgagatgacgagtaggaaatctccctggcaaactcaggtcctgagtgctccgatcgagaacatgtgaaactttcaactacttgtcaactacacagtaagattcatttctcaactactcatatgtttcacaaaaagtaactctttcaagtgagtcctactgtgtggtataccttgtcaacatgtgacacttctaaaattatttttagatacctagaataatattatgtatttatttattttaaaatgatatttatgaagaaaaaaacaatgatttcacatttaggaaggatatatgaaggaaacaaaaaccaaaataaaaatttactctttttataaagatgaaaaacactaatttcatattttaaaggaacacaaattaaataatttttttataatggctaaaattaatactaactcatttttataaggactgaatataacccaaattataacatgaaaaaaaaaattgtaaaggatggcaatcaaactattctcttataaattattcttcnnnnnnnnnnaagaattatcttaaatattacatagttccaacaaaattatctctttataaaatatatgtataattttaaaagaaaaaaattatacactaataagtaacaatgtaaaattatcattaaatcataatttataatttatgataaatttattatcttttattaaattatcttaaaaattatacaaatgataatttataatttaataataatttttaagaattaaataataatataaaataattttatattatttatacattactaacatcaccattaaactttaatttgttttaaaaaaacaataaaaaatactagaagaagggacagaaatgcactcactcaaagtcgtaggtgggggcagaaagagaagtgtggagcagaaaaagtacaaagaaaagtcataagcagcataccccacctccaactgcaaaatgcacacaactcccttcttattggtctgtctcagccattcgcgcggggctgctgcatccccttccatttccataccttatcctctctctctctctctatccccacacacaacaattgcaataaatgagtgccctctgtgtatgcacagcaccttattaattgctcatatatactctcaacatacatactccaaatacacacaacaaaatcataaactatcacacaacactacagcacctctagatttttattttcttcactgttcacactatttcctcctttcctttcacattatccctttcctttttaaacaagccatcttgcttttgttccttctcttctcatcaccaacacggtctgtgtccttcattctggattagagccacaaacataacacattccgctttgactttggaggctaagggcctaaggcaggtatgttaaaccacaacaacttaatcatctctgtgtttttaatcaaagtctctctctcttttttttnnnnnnnnnnnnnnnnnnnnnnnnnnnnnnnnnnnnnnnnnnnnnnnnnnnnnnnnnnnnnnnnnnnnnnnnnnnnnnnnnnnnnnnnnnnnnnnnnnnnnnnnnnnnnnnnnnnnnnnnnnnnnnnnnnnnnnnnnnnnnnnnnnnnnnnnnnnnnnnnnnnnnnnnnnnnnnnnnnnnnnnnnnnnnnnnnnnnnnnnnnnnnnnnnnnnnnnnnnnnnnnnnnnnnnnnnnnnnnnnnnnnnnnnnnnnnnnnnnnnnnnnnnnnnnnnnnnnnnnnnttttttttttttttttgtttcctgtttctctctgaattcttgtatgtttctatttttgctttaactgtttccctcccttggattccgctggtagtttttctgcatagagcagcagaaaaaaaagctagtagctttattagaatttcctcaaatctggcactaccctttattcttattgatagcttttaagttttggccggttctgggcatcttagtatttctctagaaagtggagagtttcaattttgaagctgaggttctggttcctgggaattcgtttcactctacttgggttttgtggaccttgatcctcaattccatgtttctctgctcttagctataaagttaaggtatgaactggggttgttgtttctgaattgccttccttcctgttagttgacaactcacgtgacagcccttaggacaaattcagattgaagcttcccacttctctttcacatttggggattgagtgttgcctttcctttttctttctttttctatttttttgtacttcacaattcacatactagaaactttatctgttttggatctgcttaagccttcctgggctgcaaattgtaaggaagtattttcaagctgagttttagcagttttggtcttggaatagtgaattttgagttcttcctgttccttgttccagttcctgtttgaagtttgggtttaagttcaaaaaatcatttgtggtgttggtttgaagcttagcttaacatagaatggcttgaatttgttgaaggtttttttgctttgtcaggttcccaatcactgtgatatcatggaatccccacaatctgttgtatcaccattcaagagctctgtcttgggtgaagctgagaagtataggtctgatgttttcacacaaggctcgggtcctttgtctaaggacattgaagtcaatggaagggaagctgccgtggttaatccggaggaatccatcggtgttgttgatgtttacattcatcaggccagggacattcataacatctgcatataccacaagcaagatgtttatgctaagatttgcttgactagtaatcctgagaatactgtctctaccaagactgtcaatggaggaggaaggaaccctgtcttcaatgagaatcttcgtctaagcgttaggactgttgattctgctgtcaaatgtgaaatttggatgctgagcagggtgaagaattatcttgaagatcagttgcttggttttgctttggtgcctttgtctgaagtactggtgaaggatggaaaactagagaaagagttctctctttcttcaactgatttattccattccccagctggttttgttaaattgtctcttgcttataccggtgcttcacctgatgttatggctatttcttcaatgcctactcagttggccgcaaatggcaccgaaaaggactcagaatcatgtgagtcactggccagagatttggacaaaattgaattcccagatccaaaaattgtaaatgaagaccactggatggtttcggaatactttggcattccatgtgaggagagccagtgttctgataacttgaccactactgatactgaaaatcttagttctgaagcaggtgttcagattgtggagtgcttctcagcatgcagtgttgaatccgtccaacctcctaaggctgattctccacccagcagtgtgttaacaaatggggtttcatctccttcagtggctgcaagctcagactcatctgatgttgctgcttccaagtctcccagtcaggaacaagtttcagccaccgaagagaaaaatggggatgtcaaagatggtgggagtgactcctcaaatggggtactgaatgagtcattcactaagcctgttgtgactgttaacatcgagcctgagccgaatgtggtgcagcaggattttgtagacatgtacatgaaaagcatgcagcaattcaccgagtcactggcgaaaatgaagcttcctatggactttgaaagtggaccaactagttcaggaaactctagctctgaacagaagatacagacaccaaagagcaccaactcccgtgtgttttatggcagcagggctttcttctgaacttttggttacgtttggatcaagggaatactttcaggtgacatagattttagaatgaaaactgatatcagtagtgaaatgaaataatgcactgtccggtgggattctcgcttctgtacttgttgatctgttataggtaacagggaatcttaactttgtactctcacaggcttggtcctatcttaactgctacatgaacttttttctgtcttgatcttattttcttgtgtttctttttgttttggatgtcaatatttgtgaaagcgattttcatctggcaaaagtttcatgctgtggataatcacgagtggtactaacatggtccccacgttcacatggcgaatactaaagttgatggaggtaccaaatcatctctgagtttgatttcttctatttcacacgaacaagagtaccgtacagcatcatggatatgcttttctttttctttttcgtgatttgggccttaagcctacattcttttatcgaagttcaacaactttggacatttggaatgatgctgttttgttaacgaaaatgaaatactcctaaaatttgaggttttgtactcaattttggatttttggaaaaatggtgttttgttaacgaaaatgaaattctcctaaaatttgaggtattgtactcaatgaaaattaaactattttctttatatacaactatcttaaattgttatatacgatatggatcctcgagttcacaagtgaactacaactgattcagttttttaaatccaatgactttcactagcaacacacatttaaaaacacacggtgctgacgagtgacaggaaagttttggaacgacactcacggtgcgaaacaaacatcatccgctggatatgaatttttaaatttaacatcagtggtcaaaatagtgatgaactacggtggaaatccctacaccggataaaattaaaagtattattttttggggggtttctatggtgtcccgaataatttgagggattttgatactgtgaattttttaatcaatcaaattatatgtcatctttttaattaaaccctaattttttttaaatgctctttataaaatcttaaacctcaaaagattttttataaaaaaaagtgtgggaaggaaactaaaagaaaaatagaattcatactactaaaattatttttaatcatatttttaatttaaaaaattgaaaattaaaaaaaatcaggactaatttgaaaagaaaaaaaaaactaatgaaaaaataacatgtaataatatttgtgaaaaattaagactgtcaaaaccctaaaattatgcaggtcagcatagaaattatttttttatttttctttctcgatatgtccttctcccttcatagtatccaaccatccctccctctctgacaccaccccgtagtcgccactgctccgcatcgacggtgtcaacagagaacaaaatgaaaacgattaatgtcctccatagatctgaaatccgacctaccccgtcgtaaaacccaccgtcacaacaccgtgaaccaccacgaatcccccacctcagcggcagccgcaactccttcacctacaaattcaccccaaaaaacgcatctttttttttttttttaaacttgcctacaaccccaacgatgaggaaacaattcaccccaaaacccaaattaaaccacacataacaaaaacccattctagttgaatcctgaaccaaccaccaccgcacaaccacggcgaattgatctggcgagttgtagtgcgggagagagagagagagagagagagagagagagagagagagaaagttgaggtttgaaggtgtcgagagcatcgacgaagatgtgagcggagattggaagttgttgagattggaaaagggaaacagtgatgatggtggaggtgaacggcatgagtgcaactgtgcaagagaagaagggtatgatcgaaaaaatatattatttcattctggcagtgtgcatatccctttggggtatcttaaaaactatggtgtgatggcaagatgctttagtttgaaaagtagttgcagagtatcttaatttcttgtaaatataatttgtagtaaccaagccaacccgtgcattgtagggtaatgcatagctagctaactagttatagttataagctacaattggaaatctaaaagtcgttttcccaactgagtattctcgaaaatacgcaatgaatatgtaaaacaaagccctccatagaaaagaaagtggtaaaacataggacataagtaaatgccaaaacagaagacctaaaaaaagtaagtaaagtatgagaaaaccatgattcttttagaataataattaactgatcacatctatcttctactcgtccaattttttttatttaaattaataaattttaaaatatatcttttataactgtttaataaaaaaaattaaaaaatacttttatatttttatgcaatttttctttggctttaaaatatttgttatttaaaaaaaattatatttgatttaggaaaagaaaaaattatagttattaaaaatttaccctcatatcttatcatctttaatacataaaataagagattgttaattaatgaaatgagaatattttaataaagaataatttaatgttttcaaaaatgttttcatacagaccaaataatgatttgtaaacatcaatttctattttcaatttatgaaaatcagcataagtgtatgaaaatatatctatggaagaaatgaatctcttaaataaatattattactttgaaaaattagtgtttgactttaagccgagcgatatgttatggttaacaatatgtagtactttatcactactcctattataatttatatgtttacaaaacgttttctaacattttaatatccttcatcgcgttaaatatgactcgttcgtcaataaaacaattctatttgtaagctgtgggacaaattgatactcctgtcacaactttacagagagtcgtatatcaagtaaaaggtagatgaacttttatcataacttaccatttttttatattagataatttggttatttctaataataatgtagaatttaatgtttgatttaaccatagtgtttgaacaattatggtgtgtgcgatggggaccatatcaagatgacaaattggcagcccaagggtagcagaagctgtagacttgttgtaacatctcatttgtggcatcaattatgataccatatatttgattgtttgcaattctaaaggtcccaccacaaagattcaacgagcctaagcctatatgaactgtgatgtgagcattggtatgatcacaaaacttaaacaaacacacacggcatggccccaatcccataaggaaaagcatttgctggcaaagacagacacaaacagaaaagcttactagaatgcctctccgtgtacaacccaatgtagagtataaaaatgttgcttgttttgactgcggacactataaggttatggcaactctataaccaagctgattctataagaataattaattgatgaacagacagtgtaaataatttttacattgttatttgattgatttccatttttacattgttagctgattcaaaataaggttatagcaattacaccaaaattttggttgacatttttcaattcttaatacaagagcaatttttttatgtgcaagaattatgatttctgaagattatgaatcttaggaattatattttttggaaatgaataaaatttgtttgattgattattggaatcttaaataagttttttaaaaatcaaagagttacacaatattttcactcaattaaataatttgataaagagtaagatgatatttttaatgtgttaaaagacgaattacttgtgaaaattaagattttcaccttttttcattgattttttatatggaaaattgattaacaaatatcctttaaaaggaatattattttaaaaaatatatatcaaacatgaaaaactaagtttttcaacctataattcttgtaaagtcaaaaaatattcccctaccaaagtcctcctacagttagtttaggaaaaaaatgggaaggatgaaagagaaaggatggaaaacaccaacttttttattattttctttgtttggagcacttaaaaaaaagagaaagaaggaataaaaagcatgagctctcacgcactaataattcttccaaatgtgaaaggaaagggaaaggaaagtttatttaaacagacttaaataccccttttttttctatattctttttcatcttcaaaatagaaggaaagaacctagtacctacacacttcaataatgcctccgaatgtgaagagaaaggggaaggaattcttgcttaaataactacaacactggacctgtgctttgcaaggtcaatggaaaagtaagtaataaaaaaattgcaatttgcaaagagataaatagaagaaaaaaaatgtaaaaattggcacaaaatggtgacacgtgtnnnnnnnnnnnnnnnnnnnnnnnnnnnnnnnnnnnnnnnnnnnnnnnnnnnnnnnnnnnnnnnnnnnnnnnnnnnnnnnnnnnnnnnnnnnnnnnnnnnnnnnnnnnnnnnnnnnnnnnnnnnnnnnnnnnnnnnnnnnnnnnnnnnnnnnnnnnnnnnnnnnnnnnnnnnnnnnnnnnnnnnnnnnnnnnnnnnnnnnnnnnnnnnnnnnnnnnnnnnnnnnnnnnnnnnnnnnnnnnnnnnnnnnnnnnnnnnnnnnnnnnnnnnnnnnnnnnnnnnnnnnnnnnnnnnnnnnnnnnnnnnnnnnnnnnnnnnnnnnnnnnnnnnnnnnnnnnnnnnnnnnnnnnnnnnnnnnnnnnnnnnnnnnnnnnnnnnnnnnnnnnnnnnnnnnnnnnnnnnnnnnnnnnnnnnnnnnnnnnnnnnnnnnnnnnnnnnnnnnnnnnnnnnnnnnnnnnnnnnnnnnnnnnnnnnnnnnnnnnnnnnnnnnnnnnnnnnnnnnnnnnnnnnnnnnnnnnnnnnnnnnnnnnnnnnnnnnnnnnnnnnnnnnnnnnnnnnnnnnnnnnnnnnnnnnnnnnnnnnnnnnnnnnnnnnnnnnnnnnnnnnnnnnnnnnnnnnnnnnnnnnnnnnnnnnnnnnnnnnnnnnnnnnnnnnnnnnnnnnnnnnnnnnnnnnnnnnnnnnnnnnnnnnnnnnnnnnnnnnnnnnnnnnnnnnnnnnnnnnnnnnnnnnnnnnnnnnnnnnnnnnnnnnnnnnnnnnnnnnnnnnnnnnnnnnnnnnnnnnnnnnnnnnnnnnnnnnnnnnnnnnnnnnnnnnnnnnnnnnnnnnnnnnnnnnnnnnnnnnnnnnnnnnnnnnnnnnnnnnnnnnnnnnnnnnnnnnnnnnnnnnnnnnnnnnnnnnnnnnnnnnnnnnnnnnnnnnnnnnnnnnnnnnnnnnnnnnnnnnnnnnnnnnnnnnnnnnnnnnnnnnnnnnnnnnnnnnnnnnnnnnnnnnnnnnnnnnnnnnnnnnnnnnnnnnnnnnnnnnnnnnnnnnnnnnnnnnnnnnnnnnnnnnnnnnnnnnnnnnnnnnnnnnnnnnnnnnnnnnnnnnnnnnnnnnnnnnnnnnnnnnnnnnnnnnnnnnnnnnnnnnnnnnnnnnnnnnnnnnnnnnnnnnnnnnnnnnnnnnnnnnnnnnnnnnnnnnnnnnnnnnnnnnnnnnnnnnnnnatcagcaggaaccaaatttggaatgtaacaataaaccaaagtataaagttgtataacaaaagtctaacaaaaaataatatctgtccagtaactaattatttgatgggggatccaagatgggtacccctctaatgtatcaaacctgataaatcaaacagaacttcacttacaatttgatcagaaacatatcccatgaaaaagatggtgacaagaacaaacagctttgccaagcattacagtggcaaaaaaaaaaaatcaaaaattaataaactatcattaagcatattaaccatgatggtgcatccctccagcaatgcacaattaaactactggaaccaatcttcctgagtatatccgcaatctgatgttacacctcaatcaaattccaagaaaggaacctagccttgaaaaataaagacaacaaaaatcccaaaccttacacaaaaacacttgtgactgatttagcttccgtatgatttcacaatacctcgttttctttaatcagtttcccttgatctactgttaccataacatatccaattaacagatctcctaagcagcaattcctgaaacaagtagacatgcaacaaaagaaaatgagtatacaatgaagttgaaccagaacaggtaaaaaacgtaatggaaatactcaaatgccaaccctttcacaacaatataatacaagaaagtatattcaaacctcatttttcactaacgaatcaaaggggtgtaatctatgtctatattctgttttacagtttgaagctctcaaatcctaattatagagaaaataatcatactcaattaacaagagtgagtaatctatgcctacatctctagcatcttgcaagttagtataacttcacatgaaacatcaaatttgaatatctttaaatgaaagtaatcaagaaactcaggcattattacagcaaagctaagggcatacttgttttgagaatatttcttctttttttctttttgttttcactaataattaaaaaaatgtcactttgttttttactttactcctgttttcaaagatttgcacaagaaatggtgaaaacatttattttatagaaaatataacttctcagtggttttcactatttcctatataaatctttgaaaacataaagtaaaaattaagtgctattttagtaatcacatgcgaaaataagaaatgagaacataaaatgttttctcaaacaaaccacagaggctaggaatatacaatgacaacatcaagaataaaggaataaaggaaacatgtcaataaagtcaggaacctagggtgtttggtataattaaaagacatgaataatgcttccatgttatgtttatctatattcacaattctaacatgatgatcataagcttaaagacaaatgtaatagcacattaaaaataaacagacttagttttcaacttccttcagtaatattcctattctgaaacatagaaagtccaaaacacacaattggttttatgaaaaaatggaaataaacaacagacaatgtataaactatgatctaattttctacatgagacaagaatgtagccaaagatcttacctctattagtttgtctacttattacattgtagtttccaataaaaccctcagaactctttactggatcatctgaagctataccaccaagtccaccatagccaaacgaaccagaagcatctatctcagaagcagcagaccgccaagttgagtcaccataaactgaaccattgcggtacaagtccccataggatccttcataatcaccagttggtgcagtaaatgttgaggattgagacacacttgggctgctgttccttccatatcctccacctcctaaactgatgctgttatctccaccttcataagagttaccccaagtactatacccagtggcagcccctccaccctgggttggaactgatggaccccaattggtgccaccatttccaattgaaacaccaaaagccccaccacttccagatcccaagtaagcgccagggctgactggactattggcagcattattcaggcccccatttccccaaacactccgggaagctgagttcataagagaatcgcttctcccattgcccccgctattgccaataggagtggtatatctgttagagttgccattgttgaaaggactcatccgagcgtatccaagactgccaccataaccggaagtccctccatagcttgggttcaatcctaaatccaaattcactcccattccataaccactggagccaaatggggtaaacccacttctggcactagtaagtggactaaaccttccatccatcctgactccaaaacctccaattggattcatattgaaaccctgagcataactatttaggaagctactggtcctattcaaaccatagttatatcctatcaatgggcttcgggtaggtccaggtgaaagctctttaggaactgccctcttgacctcaaccatcttcccattgagttcatgaaatgtcttataaagaactctgtccacagcttcttctgaatcataagtgatgaagccaaaacctcttggcctctgggtattgtgatcatacattacaacaacatcagtaattgtaccaaactgatcaaagtacttcttaaaatcactctctgtgattgttgatggtaaacctccaacaaaaatctttttggtgcgtccaggactcggagatccatggatgctaccagactgtctgtttatagtttgctgatcatccctaggaacagctttcttagcttcaacctgcaaattgacagcacaacacacacggatcaaatctgcaagtcattttcagcttcctgtcctataagcaaagagagttcaagcttaatccaatgcagccataaaaatccaagcactaatttggctgaatggagccaaaatgagcatgatttatatcacaacaacatagtagaaaatataaaagtagggacacaatgatctctatcagaaacataaatttagctaggtcccatcactgcccatccaaataacatgtacattgaaataatgcttaacaaatctatgatgaaaaactcactgtgcggccatcaattatgtgcttatccataatgactctctctgcagcagaaggatcagcaaagacaacaaaaccgaaaccgcgagcacggcctgttgtccgatctctcatgatcacagcctctatcacctctccatatttcccaaaatattctttcagacgttcatcatcggtgtcccaggaaattcccccaatgaagagcttgccaagatccgactccatctgttctgtcaccaaccatgcccagttaaccatcaatcactcatttcatcaaacaaatccaatccaaccattcttattgaatcaaaattctcatgccaaaccaaaaaacaatataacataaaaaattagaaattccaatacacacaatctagattctatattattcagtgatgggcaaagttccagtcccagaaccaatctaaatgcatagctgattgaataatgcataattgagctaaatcaccagaaagattcaatttttcatgagcaaaaacaaagcaaagcgatcagaaatgcagattagataaatctgtgaagaagggtcaccttatgttgaatctcagacagaacccagttggtgcttcaatcagatacgaagtgggttatgccaaattcgatctaagagaattggatctttggagcatcaataaaacaaactgaaccaaaatatctaatccagcaaagagagaaaaccaagcagctatgtttttttttataaaaaaaaaaatgttcttaatgttttttttagtttgttttttttgtttcttttctagaatcagagaagaagaaattgagagaaggcgaagagatcaaaggaaaaagagaggaacccagatggagacttcaccatccaaagatgaatggttggtgatggaaacaaaagaaactaataataaaaaataaataatgagaggtcatgtgaaaatttgaatggcagggaaaactaagaatgagaatgaaaacagaggatgtggtgtcatcctctctctctctctctcctgttttgctttcttatcttgttgcttgcttcaactaggtacccttaattaaatcaaaagaaatggaatttgaaagcaaagatgggcaaaacacagttcactatttatatataaatagatatattttaagagagaaagagagagagagagagagagagagagagagagacagacacacactgcaaatcgtgcaagaatatttggaggagccagcaaatgacaacagatcatggtatttttaaaattaaataaattcaactatatataaagggaaaatgtaaatcacctaattacttatttattttaaataaataatatgaattttcataaaataaattaatgtgaatatatatagatgcagtggagttgttgaacaaattgtttgttatagtaattattaatttgatatattttatattttatatagatataaaggtagcaaatccaacctaaaaagaaaaaggtaacaagaaaaaaataggaagaatacatgtatcatttaagtgaataattaattaaaggagaaaaacattaatttgacattttttttttttgctgaatggacannnnnnnnnnnnnnnnnnnnnnnnnnnnnnnnnnnnnnnnnnnnnnnnnnnnnnnnnnnnnnnnnnnnnnnnnnnnnnnnnnnnnnnnnnnnnnnnnnnnnnnnnnnnnnnnnnnnnnnnnnnnnnnnnnnnnnnnnnnnnnnnnnnnnnnnnnnnnnnnnnnnnnnnnnnnnnnnnnnnnnnnnnnnnnnnnnnnnnnnnnnnnnnnnnnnnnnnnnnnnnnnnnnnnnnnnnnnnnnnnnnnnnnnnnnnnnnnnnnnnnnnnnnnnnnnnnnnnnnnnnnnnnnnnnnnnnnnnnnnnnnnnnnnnnnnnnnnnnnnnnnnnnnnnnnnnnnnnnnnnnnnnnnnnnnnnnnnnnnnnnnnnnnnnnnnnnnnnnnnnnnnnnnnnnnnnnnnnnnnnnnnnnnnnnnnnnnnnnnnnnnnnnnnnnnnnnnnnnnnnnnnnnnnnnnnnnnnnnnnnnnnnnnnnnnnnnnnnnnnnnnnnnnnnnnnnnnnnnnnnnnnnnnnnnnnnnnnnnnnnnnnnnnnnnnnnnnnnnnnnnnnnnnnnnnnnnnnnnnnnnnnnnnnnnnnnnnnnnnnnnnnnnnnnnnnnnnnnnnnnnnnnnnnnnnnnnnnnnnnnnnnnnnnnnnnnnnnnnnnnnnnnnnnnnnnnnnnnnnnnnnnnnnnnnnnnnnnnnnnnnnnnnnnnnnnnnnnnnnnnnnnnnnnnnnnnnnnnnnnnnnnnnnnnnnnnnaataggaaacgccataacaataagaatatgttacgtgacacttcaaattattttacgtattgattataaaaacgttttaaatttaagatagtaagcatttttcatccttaaaatttgtattcagctttaatatccttacccatccatgatcatgatgttaatacaagtaatgatatcttaagattttgttcttgtaattttttttatactatcatgttgattcattattatcatttttaaaggaattttttctttcaattacgtttttaatctccacaagatcaaaactcaaaattttatttaagaaaaagaggctaaaattgttcacaccaacgacttttcatgctttggattcaaaatgagctttaaatgttgcagatttttacaacgttttaaagataaagtaaccaaagaattaaaatgttaggttattgtgggagtagatggagcatcaacttttttgtttatttcatttaaaatttgattgagagttttgatggggtaacaactgaaagtgcagctcaaaccgacgggtaattcctataaacaaaggaaaaaccaacaacaaatgtctaataactattattattattatgcaatgctacgtgaacactcaacgttgagttacaccaagttgacatatgaaggaaaacaagaacacggaaagactggttggtaacatatttttccacactcctatgatcagttggttcctcctatggacaccttgaaagctactctaaaaggcttaggcagagatcgcaatatttgaagctgaatatggagtaatcccttaccttgggttttttccaaaacaaacccatcataacgtaccacgcaatcataacgcattgacctcatttttctttttcttatttttaaaaagcttatataagaaatattgaagaaaaaaaaaattaaagccaaaaaaataataataaagtatcatattttatgagtagaaatgaaaataaaaaataaaacatttttttaaaaccaaataatcgtaattttcttctctaaaggcctttcttttcccaattggacttcttttactgcagttcctacacgctaaaacattcaagtgtatggaaaaaagaaaaagaaaaaaaacccttaaagtgttgaaaaaacataagcacatttaagcggtgaatcaacactgcgaagaccaataaatagcagagggaaacccaagtttgaccttttgatttggaagcctttgatgctactcaacttagacctcagctgttgagacgctctttttttggactttttcatagtaagatgttattttccttgagctttcttttctaaacactctttacattttacacaaccttcaaatttcatattttggttggcaagttatttttcagaagtttggtatcattaagtcatcatgttcatattataataataataataaaacttctactcggatcaacttaatagtaacaggtttagataatttacatgaggtttcgttctagatttaaactccattgtcactattataaaaagtaaataaaatttctcacataaatatttcatattaaaaattaaactttttggtaatcgggatataataggatatagttatacatgaaaattaataataaaacttctcacacaaatatttatgccaaaaaaaaatatatagtaatacgttttattctaggaatttcatattatttttcccttaagttttccaatttgcttttgttttgattgacgaggtaagacagggatttatatggattggacatgccaccccagaaaatagataaacctgttagagcaaattgactaaaagcctctaataagctaatctgaagttaaaatatttagaaggggaaatatataacagagatcgaattcctgtactcagaatttatgtttcacaatttcacttgaactgactcaaggagacataataattattcttcgattaactatttcattgctttatcttttttgtagcagtaattatcatccgcacacgctcattgcttttgaaaaatcaacccaaacgagtttcaaacgcatgacatgcttatcattattcatctgttcaggtgggtaaaaattcaagtaaaacccacaaatccaggtagcttcagtagggcttccaccatgccacactcttgtttttggataaaaaaaataaaaagttattagcattttagcatatattaagagttaggtaacatcattgtatcctacagatagagttattgaaatttcagatggaaggtttatgattctttaataaattgtgactaatctgaagtatattttagaagataagtaaagtttgacaaataattatttatttaaaagatcaaactgaaatattagtcaaacagttcaactttaatttcagcacattaatcatttgattaaacaaattcaattttaagtacacttatttcaacacctgtctgcttttgcttgttgtctatataatcaacaacttgaagcatatatagcaaaatatagttaaaaaaattcataattaacaaaatattaaaataacatgtatctaatcaagttcaaaagcatagttccagaatacaggattaattcctttataacaaaccgatgactacaaagtatcacatgtttttctactagataatgcccatagtttctaagtcatgtgggactaaattagaaaagctctcacacaggaatcactatgatatataaataggtgaatacatgttattatagggagcatgaagataaatcaataatttgatcctggagaatcccatgtttcaggtatgattttgtgaagtgaacaacattcatcgtggttggatccaatggaacagcatttggaagcgcaacgttcgtgatgttgttcatgttgatccatgacctcctcaatcttctccaaaatctccatagtggttggcctattttcttggaaacgtgacacacacaagagggctatattgagaagaggaaatgcccattgatgatcattttccctaacctctttgtcaaatacctctcctgtccattcctcccttaccatggaccttacccatctagcaaggtctattctactcacctctgtgctttttcctgttagtagttccaagagaatcactccaaagctatacacatcacccttttctgttaggctcttttcaggagctgtgtatccctgagaggaaaacaagaaacctctatttgggtccatgaattttgataagccatgctcacttattagtggctcactgttctcatcaagaaggatgtttgatggcttgagatttccatgaggaatgacctcctcctctccatccaacttcctatatatgaaggccaaaccccttgcaatcccacatgctatattcaaacgcattttccatgggaaatcttttctacctgctatataatctgcataaaaaacaaaatcaattacttttagttttgatacattggtggtgtacgtgtttatgctatcaaccaattagaaataagactattattacaaaagtcatcaacaatcttattatacatgacaattcatgattggatagcaatgtaaaaactcttcacactatctgtaattctgtatattctaaagtcattcctacttataattaagtgtcaaataacttttatatcatgatatattaaatgtttcacttttaataaaaaaaatcactttgtttttttaatcagttattagcatttgccttatattaatgtactaatgtggggtttcagctagattgttcaaatgatcaaggcagaaacataattactcgtgcagcacaagttaagatgatatggagtgttgcagctgatgaaaaacaaattaatcttaacttaccgtttaacagattaagcaggcttccattgctttgatatttgtaaatgatgagtttttcttcactggtagaacgataaccaacaagggggagaatattctgatgcttcaagttacttatcttccttaatgtttcaccaaattcttccaaggatacctgcaaattcttcaatcttttgactgcatagtgaacattgtgttccaatttcaccttgtaaaggctgctgcaaaagccttcactcctcaagtcagcggtggctcgaagaaggtcctcgagtgtgaacctttcacgatcttcaacaaagaaaacaagctcagaatctccttcctttagcttcacctcgtgaacttcatgagttgtagcctttgttattggagacacacgacgatggtctttaactacctctctctctgcacttaactttcctaacttctttacaataaagtaaatggttgacaaaagcaatccagcacccaaaagtatcacccccaaggtttctggccgtggattcttgccattattaggtgtgctgtcacttaaaggacctggcgttgcttgctgtattgtgtttgtgtcactttcctttagccactctttggtactattgctttccaacttgttacttggagtcacagtcacataataactaaggaggtgaatatattgttgtttaccagggatcataccagaaaagttgttatttgaaatgtctaagttcctaagatgtttcaattttgttaaggcatttggcaacctcccactcaattggttgccggttacatttaaatgtgtcaaccttgtacaacgcaaaattgagtgtggtatggttcctgtaatgttgttgttagccaagcttaccactctcaacttttggagcctgcatagggaatctgcatcgattgtgccactaaggttcaagttctcaagccttatatgtacaatattggtagcatttaagttgcatcttacaccattcaacttgaccaagcatggatgggatggcgactcaatccaggtaatgttaagcacgtttttgggatcaagggcccttatgaaattgaagcaagactcagactctgatgaatcacctcttgtacattttactataaagaaaataaggatagcaaaggaaactagcctccttagaaacacagcaaaatctcttgtgttctgcattttttttgtggtcaccccctccaattggctttctcctctgtagctaagggtttcgcgagagaatcatgttagtcctgcatgcttctttatttgtgcattggataaagacatgtctcttcttagaagttttcgctaggtacgtgtaatacttgtttttagtggtacatcgttaatatctacatgcaatataaaattacacgttgttccaaaattgatgaatggtatgtatatcgggattgacaacataattgcaaggtatcagtataactcttgtcatgaagcatctatcctactataaactaaggaagtgtttgtacaagggatttcaaaattttacagcgtgtgtagataggagttttgatcctctgttctccaactaaaatattcaccttttctttttagtacctaccccatatatatatatatatatatatatatatatannnnnnnnnnnnnnnnnnnnnnnnnnnnnnnnnnnnnnnnnnnnnnnnnnnnnnnnnnnnnnnnnnnnnnnnnnnnnnnnnnnnnnnnnnnnnnnnnnnnnnnnnnnnnnnnnnnnnnnnnnnnnnnnnnnnnnnnnnnnnnnnnnnnnnnnnnnnnnnnnnnnnnnnnnnnnnnnnnnnnnnnnnnnnnnnnnnnnnnnnnnnnnnnnnnnnnnnnnnnnnnnnnnnnnnnnnnnnnnnnnnnnnnnnnnnnnnnnnnnnnnnnnnnnnnnnnnnnnnnnnnnnnnnnnnnnnnnnnnnnnnnnnnnnnnnnnnnnnnnnnnnnnnnnnnnnnnnnnnnnnnnnnnnnnnnnnnnnnnnnnnnnnnnnnnnnnnnnnnnnnnnnnnnnnnnnnnnnnnnnnnnnnnnnnnnnnnnnnnnnnnnnnnnnnnnnnnnnnnnnnnnnnnnnnnnnnnnnnnnnnnnnnnnnnnnnnnnnnnnnnnnnnnnnnnnnnnnnnnnnnnnnnnnnnnnnnnnnnnnnnnnnnnnnnnnnnnnnnnnnnnnnnnnnnnnnnnnnnnnnnnnnnnnnnnnnnnnnnnnnnnnnnnnnnnnnnnnnnnnnnnnnnnnnnnnnnnnnnnnnnnnnnnnnnnnnnnnnnnnnnnnnnnnnnnnnnnnnnnnnnnnnnnnnnnnnnnnnnnnnngatacttgagggatcaaaagtccaactaatccttaatactaaaaaatgcacaaattgatataaacgttacaaggccaatttttatttgcctatctattcaaattatcattattgttttctgacaaataatatcgtaactagtttagagtttattatcaagatactgacaatgtaaaatattattcaatcacaaattataattagatacctataataaaactttttatactattaatatataacacttttttcattagtttaacacttttcgttacaaatactgaggtttttttggtaacaaaaatagcaatgctcttatatatataaaagagttaataaaaatcgatctggagaacatgattctaaaccaaacatattaaaaacattaaccgtgctgaaaactgttatattcatttttttttattttgacaaaaatatatatattcatttaacagataagaatgaataattttaattaatttatttgagtaataatatgggtgaatgttggacgacatcgattataggtgtgccggctaggatttgtaaagaaaagaaaaaaagaaaattgagtgtttatagacattatgagtgccttgatacataggtgattttcactctattattttttgttttcccttttttatcttaacccttatcaattatcatcatatcctgcatgtcttataggtaaacgcaataaatgacacagaaaggggggaaaacagaactcttgtttgggagaaacgagactagacacagtaaataaaggaaaggaaaataatagaaacaacatattttacttcacattataaaattttagaagacagagtacattaaaccactttttttttaactcttatatttgttgtgggaggctgtggtcatgagcatgcggctgagtcattgcataagaaagaattagaaagtagcccgttaaattgcataactagagattatggaagtgagtattatttttcacaagccaagtgaaatatatatcttatctcgtgtatacttccctggaactctccttgcataccaaaaagttcagtaccttctacttctaacaattgttaatataaaattttgttaatttgtcgggagatttaacttagtcgattgagtatagtatatgaattattataaatcttttgatattatctttgattcagggcgagtcctgacataacagtaaagttatatcttggtaatttattggtcataggttcaaattcaaaaacatatctctcctccttaactgtgtataatgtgtaacctctgagcaatagagaaaagagatcttgactaatctagaattcgatcaaatttaagtaaaattcaacacattaaacaagttgtttaatttctaaatgtaaataactttgctacatatatcatcgaatggaaagtacaatttggttactactctattaatttaaacatgttatgattatctattgtaagtacggtccataatataaagttgttaaaataataattttatccatttttaaggtgatccaaatattaaggttaatttacaaatcaattcaaatcttatcttctttataagttttcattattgatattctaaatcaaatcaatataagtgaaagtaattaaattaattcaaaatttaaatttaatactctgatcgcacttttaaatttaatataatttttgcaagaaaatcattcacaataaattagttcttaaaagcaactattttttatcattaatatcataacattaaattaatgaagtagataatgcaatctgttttgaaatagtgtattttttatatatatttgtattgcctaaaatggtttacatttaaagcaaaaaaaaaaatcttattttttggcaaatagctgtcatggacctggttatatagataggagactaattgtagcattagcatgtgccgtgccttgaatatgttagattatacatgaacaactaattaataattgaaaataaacattcattgactttccacctctgcaaaaaatatttcctctatctaccttgacctgcatgatatgaagtactaatatatgagcgatattaccgcaatcactgttataacatcaaacgtaacgaaattaaaattgaatatattcccctgccataattccattggccaacttccattgaaattgcccctaaggttgtttaaccaccttgtacttgtctttatctccaatttgctctggcagaagatgaatccgggaagtgttcttttcttttggcaatgatattattttattgttgttgaattatgtagtagttctttggcattcgtgaggaatttgcaaagtacaatgcttggattcgtgccctgcaaataaaagaatattgaaaacaataagaaaagtcaatgtcaaaattccttattggtttaaggagaaaaaagatgtggtacatccaacgggtcactacaataatttgattaatttcacaacaaaaatgagtggggttgcacgatacaagtctaaataccctttagttcacacctacttctcttcatcattaagcttagccgttggaccaatttttaaaacatgaacaactcattttgcttgttgtaattattatatgtaagctggcctccaacatatatcatgctgcgtaaactgcgttcaaacccttgacttcacttttctttgccctcaaatcaaacgataaaacccttttcattctcacattgtttttgattgcttccaatcaggatcggttctgaaaattctttggtccggggcgaagtggaaaaaatggatccttattacacatttttttttaaatacaaataatattaaaactaagagatagaaaaaacggacccttaacacacaaattttttaaataatattaaaactaaaagatgaaaaaaatggacccttaacacataaattttttgaaatacaaataatattaaaactagggatgaaaaaaatgagtctctaacacacaaaaaatggattcctaatatacaactttttttaaatacaaataatattaaaactaacagatggaaaaaatgggcccctaacacataaattttttgaaatacaaataatattaaaactaacagatggaaaaaatgggcctctaatacacaaattttttgaaatacaaataatattaaaattaagagatggaaaaaataggcccctaacactcaaaatgggcccttaacacataaaatagacccctaacataaattttatttttattttattttttttaataaaaaattttacttaaactatcggcccaaaaatttttggaccctgggcggaggccctgctggccctgccccaggccgggcctgcttccaatatctcatttccgttattgaaggtggcaataaaagaaagcattcaaatattgaaaattgaaatacccttttgatattcaaacattctcaaggatggtaaatttagggtttatttaaataaacttgtataaaaagattaataaatcttgtacactacaaaatgataaaataaaaagtacatataaaggatatgattttcaaggatgaagagaatagtttttaaaatgtaattttatatttggatgaaatcgttaatacatatcctttagtttactagaatcacgtccttctaaaatgggacagttatatttttttataaaatttcctttctaagattacatttaaagactttagtactatttttatttttcaagatatagtatttattccatcacacatcccccttgactgctgattacatctaaatatactattttaacatatattgtcaaatcaaatcatcattcaatgtatgccgcacaactcatctgtaaaatttcctatgtacaaaaacaaaaggacaccaaccccaatcaagccctccccctggtaacccccatattcaaccaaaccttatccaatttcacaacttgccaaatggaaaaaatatataaacaatttatgttcacagttctaggctgcccaaattgacattgcatactgaaaaggtaggtgaatcaaattaaaaaaaaaaaaacacacatatcaaatcaacactgtaagaaatattctattggtatgaacaagaacagtcgtcattttcttcatcatcaacaatctcatcaaagaaaggatctctgagaagctctgctgcagaaggcctagcccttggccgagcaaggcacttctcaataaaggccttaacctcaggatctttgaccttgttcaaggcagcaggtctaactccagaagacaccttcttgtatattttagcaacattgtcacattcactataaggaatctccactgtcaccatctctaacacacacatcccaaatgagtatatgtccaccaattctgtgtagtcttcatcgtataactctggagccataaattctggtgtaccaagaatcgtgtgtgcacaatggttcttgcccacaattgctgccaaacccaagtcaccaatcttaacctgataaccatgaaaaaagatacaatcactaacaacacctttattgtaattacatatataacagcataactaagattaaccttggttgtaatagtggctaaaggcaaacaagtttgaagtttctaaaccaaaaaaaatatttgataacaatagtttccaaaaatagtttaaaatcaaaatatcttagactattatggttttttactttcaattttccattattcgtgttgtttcttatgctatcccatcttcttgccctattatagttttaatgcatcacttatttcacctctcatattttttcatagtagaaatttataggcaaaaacagagcaaggaaaaaagtaagcaccaaattagtattctaaaaacaatgtaattgatcgtttttgtcaagcaaacaggagacatcatccatgacttgctcaagttaattacttagatctcacacggaaggcatcgagtcaaaggaaagttaagaaaaagaagaaaaaaaatccaactttttcttgcatttttggtagtttactttcaccttgataatcaatcaaacatatatgatatataactgaacggaaaataagatttgaacaaaatggttcacctggccagtattcccattgacaaacacattgctgcaattgagatctctgtggatgatgcagggatcatgcaagtgcaaataattcaaccctttcaaaatctgcttagaccacttctttagtgcctttatggaaacatgcctatgcttcttcctgtactccctcaaattcccactggtgcaaacctcagtgatgaaattcaaagtgtttcgctgctcatccctccacacatggtaaagtgcaatgatgttcttgttggacaagcctctgagcaacctcacttcagagtaaagcctatccaacatggcaggatcatcacagaagttcctcagcttcacctggttccatgccacctctattccttcttcctgatcaaatgcacgatacactttcttcacagcaccacatccaagcaactcactgtatctaccatagcgaccggttggatcggtctcaacaaatggctcggaatctttgtcagggttaacactcggcatctatcacatgtaagaccaatcagatactcggcaaaatctaatcatatcaaatcaaattcagcatgccactaaattttgtggaagaaaaaggaaacaaacaacaacaataacaaaacaacccccattgaagtcttcagatgaaaattatcaaagaaaaatcaatcaaaaaataattttctgcaactaagtctagcaattaattcattgatttttatgactatcacgttttcatgtcagtcaatcttctcttaccatgtgaacaagtttttcaattcactaaaaagagataataaaattcgattatgtgtgatatgaatattggctgaacttatgaacatgtagtaatttcaaaccatacaataatttctcaccagatatttatataagtaaaacagaaaaacacacacagaacacttcaaatctggtgggctatgtgagttgtttaggagaagaatggtaaatgaatgaatataatgcatgaaagaataaggataagattgataaccatgaagagaaccgattgcttgacccccaagggagagaaaacaacacaattctgcagctttcggcagaaaagagaagctgactacgctccaacctcaaatcagacacagaaaatgaggggagagatcagagacgtgtaaatgtgactatttataattataataaagatgcagtgttgaggagtaattaatgcaaactataaagtattgacggttttctttgatctttattttatcttttttcgaattcaactttttctatatcttttaaaattgtatagtaacaaatataaaaataatttgatactatcatctgaacaaaactcaccattcatgaaaagttagttgatttctttaaaattattttaaaaattatatcaaccacaaaaaaaaaacttgattcttttaaattgagattacgtattcaattcaaattttgtaaataaaaagaagtttgagtagaatttttttgaaatgagtttattttactcagctcgaattacttaaaatttaatatgacttttaaaaataaaagattagggagaaaaattaataaaaaaaaacaaatgaattcattgtcttttaaccacactcatcattgtcatgtcatgactcattggagatgtatatgcgattggattgagattctctcattttagtgaaattttccgacattgtctctgctatgggtaaattccaataaatgaaagagaattttttcctatgtcattataataacgtctagagaataatttttgaattttctataatatctttgtattattctttctatttattaaacataaaaaaaaagtatttgaagatatcgaatatatttacttttatttgatactttctgtatcaaaaaatgtaaatgaagatttgttaataatattaaagccgaagtgccgaactaaggaaacgggtttgcaatttgcatcgtgttttttgggcgttgaggaaagtcaaataaaccctgcaacctgggaattttaatgactgcgttttagttagcctttgttttgtgggtcaacgcgtaaggctttgacgacagcgcgtgcgagacaaacaatgatggatgagcgtgttgaggtgcttctaatagctttccaggtaatggggaagagccgaagaggttaccttccaagaaaagaaaacattagaaagaaataacaaaatcagtttgtggcttcagaatcacattctcttgctgttgacaggaatccaactaaagagaactggggaaaaaaaaagagttaacaattaaagtcagacatactatgtgcatgaaaaagaaagaaaactgagaggtataagttattatattatttgatatttaaacaatgaaagtagaaagcaaataatctatctgatataataatagaattagtagataattatattctttaaacatgtcgatagagattgattctctaatggtgcatatgaaaaaannnnnnnnnnnnnnnnnnnnnnnnnnnnnnnnnnnnnnnnnnnnnnnnnnnnnnnnnnnnnnnnnnnnnnnnnnnnnnnnnnnnnnnnnnnnnnnnnnnnnnnnnnnnnnnnnnnnnnnnnnnnnnnnnnnnnnnnnnnnnnnnnnnnnnnnnnnnnnnnnnnnnnnnnnnnnnnnnnnnnnnnnnnnnnnnnnnnnnnnnnnnnnnnnnnnnnnnnnnnnnnnnnnnnnnnnnnnnnnnnnnnnnnnnnnnnnnnnnnnnnnnnnnnnnnnnnnnnnnnnnnnnnnnnnnnnnnnnnnnnnnnnnnnnnnnnnnnnnnnnnnnnnnnnnnnnnnnnnnnnnnnnnnnnnnnnnnnnnnnnnnnnnnnnnnnnnnnnnnnnnnnnnnnnnnnnnnnnnnnnnnnnnnnnnnnnnnnnnnnnnnnnnnnnnnnnnnnnnnnnnnnnnnnnnnnnnnnnnnnnnnnnnnnnnnnnnnnnnnnnnnnnnnnnnnnnnnnnnnnnnnnnnnnnnnnnnnnnnnnnnnnnnnnnnnnnnnnnnnnnnnnnnnnnnnnnnnnnnnnnnnnnnnnnnnnnnnnnnnnnnnnnnnnnnnnnnnnnnnnnnnnnnnnnnnnnnnnnnnnnnnnnnnnnnnnnnnnnnnnnnnnnnnnnnnnnnnnnnnnnnnnnnnnnnnnnnnnnnnnnnnnnnnnnnnnnnnnnnnnnnnnnnnnnnnnnnnnnnnnnnnnnnnnnnnnnnnnnnnnnnnnnnnnnnnnnnnnnnnnnnnnnnnnnnnnnnnnnnnnnnnnnnnnnnnnnnnnnnnnnnnnnnnnnnnnnnnnnnnnnnnnnnnnnnnnnnnnnnnnnnnnnnnnnnnnnnnnnnnnnnnnnnngaatgactcttgcttgcgaggacgaggtaatattttttttagtctagatgtcatatatctttcattgtcatatatctttcatcgaaaataatcatatttagctaataaaaaatgattatcaaaacattcctatttaaattgggtttaattattatgaacatcaaaactctttctctctgaatatttaataattatcaaccctaatgattcagttatatttgaaattttgaacacgaaactactgattacaagataatagtttcatgctaggatggtagatgaggtaacattttccataataaacatttgcatcctctaatttagtatttgtcattcatgtgtttataactannnnnnnnnnnnnnnnnnnnnnnnnnnnnnnnnnnnnnnnnnnnnnnnnnnnnnnnnnnnnnnnnnnnnnnnnnnnnnnnnnnnnnnnnnnnnnnnnnnnnnnnnnnnnnnnnnnnnnnnnnnnnnnnnnnnnnnnnnnnnnnnnnnnnnnnnnnnnnnnnnnnnnnnnnnnnnnnnnnnnnnnnnnnnnnnnnnnnnnnnnnnnnnnnnnnnnnnnnnnnnnnnnnnnnnnnnnnnnnnnnnnnnnnnnnnnnnnnnnnnnnnnnnnnnnnnnnnnnnnnnnnnnnnnnnnnnnnnnnnnnnnnnnnnnnnnnnnnnnnnnnnnnnnnnnnnnnnnnnnnnnnnnnnnnnnnnnnnnnnnnnnnnnnnnngatcgcatgttgatgtagtttggaaacaaataattcttataaataaagcaaataatgctttatatcagttaaaccatatattatttgaagatttttttctttaagtttttattcgtttggattattgcttcacattattgctttataccgtaagaataatgtgattattttcattggaaattgtcctattttatggggaaatgctatttttagttagagttattaagtccatgtagccctttcattcatccatgagttaattacttgtatcatatgaccatacctttcaacatgcacgaaaggccttgaatcaccgaaggtgccatttgtcaacgaacgaaaagaaaagtggatcatcactttaagctcaagatttgatttccaataatgattacggtaaattgttaattgtatatttgtttcagtttattttaagggaacttttccccattaacttgttgagaacgttttcaaaaaatcggcaattatttcttaaaatttatactacaataaatatagattaaccaaataatatacaattaatatccatactggatcggagcatagcagcccaagcattatggcccaattaatatccgtactgttgttgtgacactagtgtttaggattaggattgttggtgtttttagtccttgaaaaatagtcatctttgagtgtctgattggataaatcataaacatttattggagaaaaaatgaaatgagacagagtttcaggttgaagtcccttaattgttggttatatctgagcagttaggagatgatattatggtgtaaatgtgtgtttttgttttgttgttgtagcttgttaactgttgttgtaagctatgacactagtgtttagggttaatggtgtctgaggatcatctttcggcttttttatcaaatgggggtaaaaaatttacgtaattacgttttggaggcaaaaaaaattttatttcctaaaaaggggtaagtcggatgactttttacgactttactgccagaaatcgtaaaaagtattacgactcctattttttcattttcttaatattttataattaaattataatagaagtcgtaaatacatttacgactttaaagtcgtatacagtgcagcccgaattttttttttttggaatttggatttnnnnnnnnnnnnnnnnnnnnnnnnnnnnnnnnnnnnnnnnnnnnnnnnnnnnnnnnnnnnnnnnnnnnnnnnnnnnnnnnnnnnnnnnnnnnnnnnnnnnnnnnnnnnnnnnnnnnnnnnnnnnnnnnnnnnnnnnnnnnnnnnnnnnnnnnnnnnnnnnnnnnnnnnnnnnnnnnnnnnnnnnnnnnnnnnnnnnnnnnnnnnnnnnnnnnnnnnnnnnnnnnnnnnnnnnnnnnnnnnnnnnnnnnnnnnnnnnnnnnnnnnnnnnnnnnnnnnnnnnnnnnnnnnnnnnnnnnnnnnnnnnnnnnnnnnnnnnnnnnnnnnnnnnnnnnnnnnnnnnnnnnnnnnnnnnnnnnnnnnnnnnnnnnnnnnnnnnnnnnnnnnnnnnnnnnnnnnnnnnnnnnnnnnnnnnnnnnnnnnnnnnnnnnnnnnnnnnnnnnnnnnnnnnnnnnnnnnnnnnnnnnnnnnnnnnnnnnnnnnnnnnnnnnnnnnnnnnnnnnnnnnnnnnnnnnnnnnnnnnnnnnnnnnnnnnnnnnnnnnnnnnnnnnnnnnnnnnnnnnnnnnnnnnnnnnnnnnnnnnnnnnnnnnnnnnnnnnnnnnnnnnnnnnnnnnnnnnnnnnnnnnnnnnnnnnnnnnnnnnnnnnnnnnnnnnnnnnnnnnnnnnnnnnnnnnnnnnnnnnnnnnnnnnnnnnnnnnnnnnnnnnnnnnnnnnnnnnnnnnnnnnnnnnnnnnnnnnnnnnnnnnnnnnnnnnnnnnnnnnnnnnnnnnnnnnnnnnnnnnnnnnnnnnnnnnnnnnnnnnnnnnnnnnnnnnnnnnnnnnnnnnnnnnnnnnnnnnnnnnnnnnnnnnnnnnnnnnnnnnnnnnnnnnnnnnnnnnnnnnnnnnnnnnnnnnnnnnnnnnnnnnnnnnnnnnnnnnnnnnnnnnnnnnnnnnnnnnnnnnnnnnnnnnnnnnnnnnnnnnnnnnnnnnnnnnnnnnnnnnnnnnnnnnnnnnnnnnnnnnnnnnnnnnnnnnnnnnnnnnnnnnnnnnnnnnnnnnnnnnnnnnnnnnnnnnnnnnnnnnnnnnnnnnnnnnnnnnnnnnnnnnnnnnnnnnnnnnnnnnnnnnnnnnnnnnnnnnnnnnnnnnnnnnnnnnnnnnnnnnnnnnnnnnnnnnnnnnnnnnnnnnnnnnnnnnnnnnnnnnnnnnnnnnnnnnnnnnnnnnnnnnnnnnnnnnnnnnnnnnnnnnnnnnnnnnnnnnnnnnnnnnnnnnnnnnnnnnnnnnnnnnnnnnnnnnnnnnnnnnnnnnnnnnnnnnnnnnnnnnnnnnnnnnnnnnnnnnnnnnnnnnnnnnnnnnnnnnnnnnnnnnnnnnnnnnnnnnnnnnnnnnnnnnnnnnnnnnnnnnnnnnnnnnnnnnnnnnnnnnnnnnnnnnnnnnnnnnnnnnnnnnnnnnnnnnnnnnnnnnnnnnnnnnnnnnnnnnnnnnnnnnnnnnnnnnnnnnnnnnnnnnnnnnnnnnnnnnnnnnnnnnnnnnnnnnnnnnnnnnnnnnnnnnnnnnnnnnnnnnnnnnnnnnnnnnnnnnnnnnnnnnnnnnnnnnnnnnnnnnnnnnnnnnnnnnnnnnnnnnnnnnnnnnnnnnnnnnnnnnnnnnnnnnnnnnnnnnnnnnnnnnnnnnnnnnnnnnnnnnnnnnnnnnnnnnnnnnnnnnnnnnnnnnnnnnnnnnnnnnnnnnnnnnnnnnnnnnnnnnnnnnnnnnnnnnnnnnnnnnnnnnnnnnnnnnnnnnnnnnnnnnnnnnnnnnnnnnnnnnnnnnnnnnnnnnnnnnnnnnnnnnnnnnnnnnnnnnnnnnnnnnnnnnnnnnnnnnnnnnnnnnnnnnnnnnnnnnnnnnnnnnnnnnnnnnnnnnnnnnnnnnnnnnnnnnnnnnnnnnnnnnnnnnnnnnnnnnnnnnnnnnnnnnnnnnnnnnnnnnnnnnnnnnnnnnnnnnnnnnnnnnnnnnnnnnnnnnnnnnnnnnnnnnnnnnnnnnnnnnnnnnnnnnnnnnnnnnnnnnnnnnnnnnnnnnnnnnnnnnnnnnnnnnnnnnnnnnnnnnnnnnnnnnnnnnnnnnnnnnnnnnnnnnnnnnnnnnnnnnnnnnnnnnnnnnnnnnnnnnnnnnnnnnnnnnnnnnnnnnnnnnnnnnnnnnnnnnnnnnnnnnnnnnnnnnnnnnnnnnnnnnnnnnnnnnnnnnnnnnnnnnnnnnnnnnnnnnnnnnnnnnnnnnnnnnnnnnnnnnnnnnnnnnnnnnnnnnnnnnnnnnnnnnnnnnnnnnnnnnnnnnnnnnnnnnnnnnnnnnnnnnnnnnnnnnnnnnnnnnnnnnnnnnnnnnnnnnnnnnnnnnnnnnnnnnnnnnnnnnnnnnnnnnnnnnnnnnnnnnnnnnnnnnnnnnnnnnnnnnnnnnnnnnnnnnnnnnnnnnnnnnnnnnnnnnnnnnnnnnnnnnnnnnnnnnnnnnnnnnnnnnnnnatatatatatctcttattttatataacaatgtgtttttaaacaaaattattgatcttttcaaattactcaaataataaaaaaatatattaaattaataacaacttttaaattttatatacttttaaattatattaaattaaataaatcattacttcaaatatcttatttaattacatttgaaaaaaaaattaacttcttacgtagaattaaatccaaattccaaaaaaaaaataattcgggctgcactgtttacgactttaaagtcgtaaatgtatttacgacttctattataatttaattataaaatattaagaaaatgaaataataggagtcgtaatactttttacgatttctggcagcaaagtcgtaaaaagtcatccgacttacccctttttaggaaataaaattttttttgcccccaaaacgtaattacctaaattttttacccccatttgataaaaaagcctcatctttcgtttaagttccaggttgcaatcccttaattgaatttgattttttgctttatttgagctggtaggagatggtattgtgcatctgattattgtctacgatacttaatttgtgaatgaatttagagatctcacttttcttcttatttggagtcttgttaaactcaatttaatctagttttataaagttttaactttttagttggttatcttattttgtagttatcttagtatttctaattcctttttgtagaaatagaggttgaagttggaaagaaaattaggaacagcttgaaatgtgcaaagaaatgcgttaaagacagttgctaagccataattttagactaaactaaaattcagatagagaacaaaagattcaagcctgactaagcaagaatcgatggctgagcaagagttttgttgtgttcatttgagatctgtgtattttaactataccaaattttatgcctaagcgaaaattgttgccaaaaatgaaaagttttcttatgtatttaaagtggatgtctatctaataaaggatggttcttcattttttatattttgtctagagacacaaagttcccgctattcctttggagataagtttttcccttgggtccttttctccatttctcttccatctttcatggattttggagctactcatgactataagtagttaagttacttcattgttaaagttaggtgaaaaattactcaatctctcttgtacctcttggtaaatatatatatannnnnnnnnnnnnnnnnnnnnnnnnnnnnnnnnnnnnnnnnnnnnnnnnnnnnnnnnnnnnnnnnnnnnnnnnnnnnnnnnnnnnnnnnnnnnnnnnnnnnnnntaccaaaataaataaatatatctcttatttcatatatcaaaaaaaagtctactgtcacaaaaaattatcaaacaatatttttatccaaattacaaatttaaaattgctaacaacaattacaaaattaatttaaaaactaataaaattaatatacaaaattataataatttaatttatatacaataaaagaaccaaacaaattaaatatcattacttcatatattaaatataatttaaattatatatttattaaattattttaatgtctaatttaatatttttctaaaatttaaatatagtttttttcttataatttcttttcttttccatctttctgttttcttttaactctttttttttttaataacaaggaagtcgtgtggagctccacgacttcaaagtcgtgtgatgctccacgacttccaactttttttaatttattaaattaaattttcttttttaaacaatttttttagttacattttttttaaaaaattaactataaattttacgattatttaatttataaatacaaataaatatatctcttatttcatataaaaaaaatgttcaaaaatatttctatcgaaataataaattgaaaattactaacatcaattacaaaattaatttaaaaactaataaaattaatataaaaaaattatgattaaaaaattaaatatcattacttcatatattataaattgtatatttaataaattatttaacggtttaatttaatatatttctaaaatttaaaagccatttttttcttataatttaattatttaactttaaattttaaattttatttaccaaaataaataaatacctataaataaatatatatatatatatatatannnnnnnnnnnnnnnnnnnnnnnnnnnnnnnnnnnnnnnnnnnnnnnnnnnnnnnnnnnnnnnnnnnnnnnnnnnnnnnnnnnnnnnnnnnnnnnnnnnnnnnnnnnnnnnnnnnnnnnnnnnnnnnnnnnnnnnnnnnnnnnnnnnnnnnnnnnnnnnnnnnnnnnnnnnnnnnnnnnnnnnnnnnnnnnnnnnnnnnnnnnnnnnnnnnnnnnnnnnnnnnnnnnnnnnnnnnnnnnnnnnnnnnnnnnnnnnnnnnnnnnnnnnnnnnnnnnnnnnnnnnnnnnnnnnnnnnnnnnnnnnnnnnnnnnnnnnnnnnnnnnnnnnnnnnnnnnnnnnnnnnnnnnnnnnnnnnnnnnnnnnnnnnnnnnnnnnnnnnnnnnnnnnnnnnnnnnnnnnnnnnnnnnnnnnnnnnnnnnnnnnnnnnnnnnnnnnnnnnnnnnnnnnnnnnnnnnnnnnnnnnnnnnnnnnnnnnnnnnnnnnnnnnnnnnnnnnnnnnnnnnnnnnnnnnnnnnnnnnnnnnnnnnnnnnnnnnnnnnnnnnnnnnnnnnnnnnnnnnnnnnnnnnnnnnnnnnnnnnnnnnnnnnnnnnnnnnnnnnnnnnnnnnnnnnnnnnnnnnnnnnnnnnnnnnnnnnnnnnnnnnnnnnnnnnnnnnnnnnnnnnnnnnnnnnnnnnnnnnnnnnnnnnnnnnnnnnnnnnnnnnnnnnnnnnnnnnnnnnnnnnnnnnnnnnnnnnnnnnnnnnnnnnnnnnnnnnnnnnnnnnnnnnnnnnnnnnnnnnnnnnnnnnnnnnnnnnnnnnnnnnnnnnnnnnnnnnnnnnnnnnnnnnnnnnnnnnnnnnnnnnnnnnnnnnnnnnnnnnnnnnnnnnnnnnnnnnnnnnnnnnnnnnnnnnnnnnnnnnnnnnnnnnnnnnnnnnnnnnnnnnnnnnnnnnnnnnnnnnnnnnnnnnnnnnnnnnnnnnnnnnnnnnnnnnnnnnnnnnnnnnnnnnnnnnnnnnnnnnnnnnnnnnnnnnnnnnnnnnnnnnnnnnnnnnnnnnnnnnnnnnnnnnnnnnnnnnnnnnnnnnnnnnnnnnnnnnnnnnnnnnnnnnnnnnnnnnnnnnnnnnnnnnnnnnnnnnnnnnnnnnnnnnnnnnnnnnnnnnnnnnnnnnnnnnnnnnnnnnnnnnnnnnnnnnnnnnnnnnnnnnnnnnnnnnnnnnnnnnnnnnnnnnnnnnnnnnnnnnnnnnnnnnnnnnnnnnnnnnnnnnnnnnnnnnnnnnnnnnnnnnnnnnnnnnnnnnnnnnnnnnnnnnnnnnnnnnnnnnnnnnnnnnnnnnnnnnnnnnnnnnnnnnnnnnnnnnnnnnnnnnnnnnnnnnnnnnnnnnnnnnnnnnnnnnnnnnnnnnnnnnnnnnnnnnnnnnnnnnnnnnnnnnnnnnnnnnnnnnnnnnnnnnnnnnnnnnnnnnnnnnnnnnnnnnnnnnnnnnnnnnnnnnnnnnnnnnnnnnnnnnnnnnnnnnnnnnnnnnnnnnnnnnnnnnnnnnnnnnnnnnnnnnnnnnnnnnnnnnnnnnnnnnnnnnnnnnnnnnnnnnnnnnnnnnnnnnnnnnnnnnnnnnnnnnnnnnnnnnnnnnnnnnnnnnnnnnnnnnnnnnnnnnnnnnnnnnnnnnnnnnnnnnnnnnnnnnnnnnnnnnnnnnnnnnnnnnnnnnnnnnnnnnnnnnnnnnnnnnnnnnnnnnnnnnnnnnnnnnnnnnnnnnnnnnnnnnnnnnnnnnnnnnnnnnnnnnnnnnnnnnnnnnnnnnnnnnnnnnnnnnnnnnnnnnnnnnnnnnnnnnnnnnnnnnnnnnnnnnnnnnnnnnnnnnnnnnnnnnnnnnnnnnnnnnnnnnnnnnnnnnnnnnnnnnnnnnnnnnnnnnnnnnnnnnnnnnnnnnnnnnnnnnnnnnnnnnnnnnnnnnnnnnnnnnnnnnnnnnnnnnnnnnnnnnnnnnnnnnnnnnnnnnnnnnnnnnnnnnnnnnnnnnnnnnnnnnnnnnnnnnnnnnnnnnnnnnnnnnnnnnnnnnnnnnnnnnnnnnnnnnnnnnnnnnnnnnnnnnnnnnnnnnnnnnnnnnnnnnnnnnnnnnnnnnncacattattagattaattgcaatgataataattatttgatattttgaagttactaatattttggatttgatattttgaagttattgatattttgaatttatgaagatcagcataattgataagattatttgaagataagattaattgaagaatcctgaagattgatatcattcaagatgacattgaattaagaagatttgtttctatttattttttagatattatgtaaggagattagaagattgatcttgccaatatatttatctttaatattgcattcaaaaatagataaaatatttttaatattgcattcaaaaataagatataatattttaagattgcattgcgtgataagataaaatatttttaagataaaatagaatatcttttaggatttcattggataaaatcatatctttaaattagtataaatagaaacatactcttgtgtttacagtatgcattccattccaaataatattagagtttcagagagtttatgtttgcatcattgagagagttgttgtgagatcatatagaagcatttggcaagtttgattcttcaactctccatcaggatttaaaggtacctatttgcttaaggaatagaagcgtaaaggtaactattttaattgtattcttcttcttgactttggaagaggtcgcaactgggaaactaggataccagatttgtctctgttcttggtgaattgagacgtgcgacttctggctgggaaacaaggataccagtctgtctctattcttggtgaattgagacgagagctttttgctgggaaacaaggataccagctgggataattgttgtgtaagggtagactaggaaactaggatactaggaactcttgtacacaaaattatcatagtggagttgtccattggattggttatccaatttggacatcgtggttttttttacccaattgggttttccatgttaaaattgattgtgttctctttatcttttatcttcatattattgttttaaatttgattttaaattgtgaattattttataaaactcaattcacccccccctcttgagttcatctgggaccaacaattggtatcagagctgtgttctctttattttgcaggtaactcctgaagagtagatcttaagatgaacccaatggagacaataagagaaggttactctacccaaaggcctccactattcgagggaaagtactataattactggaagaacagaatggagattttcattcaagcagagaactatcaagtctggaaggtaattgaaaaaggagactttcagatcacaaagatgaatgaaaagagagaaagagtgccaaaacttgaggacgaatatactgatgaagattggaaaaagttggaatacaatgctcaagccaagagaattcttcattgtggactagggacacaagaatacaaccgtgtgatgggttgcaaaactgccaagcaaatgtggaatcttctagaggtaacacatgagggtacaagtgaggtaaaacagtctaaaattgatctccttatgcatcaatatgaattgttctctatgaagcataaagagtctattagagatatgataactcgtttcactaacatagtaaatgagttaaatgctttaggcagggatatacaggttgaggagcaagtaaggaaaattctaaggagtctccctagagaggactggatgccaaaggtcactgctttgcaagaaaccaaagactttaagactttcaaccttgagcaattggcaggatctttaatgacatatgagatgcaactggagtcccacaggaaggaagatgtaagattgaaggataaaggcattgctttaaaagctcaatcaaaggaagtgagtgatgactcagatgatgaggaagaaattgcaatgcttgtgcggaagttcaaaaaacacttaaagaaccaaaagtttaatggaagctcaagcaataaacaggtaaaatccaaaactttttcttcttcaagaactgattatagttgctttaggtgtggtaaaacaggtcataggattaaggattgtcctgaagtagagcaagaaagtagaaatgagaagaaggctaaagagcagaagaaatatggaaagaaggaattcaagaaagcaatgatggctgcttggagtgattctgattcagaggaagaagacactgaaagtagtgaaactgaagccaacatctgccttatggctggaactgactcagaaggtgaagacactgaggtaaattttcttgagctgagatcttccatgcatttgttaacaaagaagcatctattgaaaattaataactttgtaatagatgagtatttaaaaatacgtgaacataatgatgagttgattgatgactttggtgaattaaagaatgagcttaaaaaattctctaaggctaataaagaattgagaaaaaccaaagagagcctagaggaggaaatcactagccttaagaatatcgcttctgaacttgaaaacgaaaatgcttctctaattgttaaattgaaagagcataagaaagaggaatgtgtggcaatttgtgatgctctattggaagaaaaaattaaaaaattggagggtgaagtagaaaagttgactaaagagaataacgacctccaaaataagctagagtcagcccttaggactcccaaggtagatagacccaacgctgttgactggttgaataagaattgtaacacatctaggcatgggttaggctttaaaggtaataagaaatctacctggaaaacaaaaactaagcatgtggaattgtatgaaaaaagggtgtgttatcattgtggcaaggtaggacatattaaatttgaatgcaagagtaggataaaagctattgaaaagaatgtcacttatgttaagaataactctatttctgcatgcaaagtaaaacaagtttgggttagaaaagatgagctttctaactttgttgagaagaagaagggacccaagctagactgggttcccaaaactaatcattgacttgtgactgcaggttggagtgagggggaacaatatgtggtaccttgacagcggttgttccaagcacatgacaggagataaatcaaaatttctctcactcaaaccttttgaaggtggaagtgtgatctttggtgacaataacaaaggaaaaattatgggtgtaggtaaagttggtaagtcaccatcacactccatagataatgtgttttatgttaagggtcttaagcatgatttattaagcatttctcaattttgtgataaaggtaacaaagttgagtttacttctgataaatgcttaataactagaatggattcaaatgaggtaattctagaaggtaaaagaattagaaacacttatcaggttgatttgaattgtttgccaaatgtttctctcacctgtttgagtgttttagataatgactcattgttgtggcataagaggttaggacatgctagcttgaataccatcaagaagctgaattcatatgaactggttgatggtcttccatcaataaaagttcaaaatgataaggtatgcgatgcatgtgcaagaggtaagcaggtaagatcctcctttaaatccaaggacatggtaagcactactagaccttttgaactcattcatatggatttgtgtggaccaatgactatcatgagtaggtctggtaagagatatgtttttgtgattgttgatgatttctctagatttacatgggctatttttcttgcaacaaaatatgagacttatgatgaatttaaagcttttgtcaagaaaaatcaaaacttatttgaacatcaacttgcttctatcaggtctgataatggaggagaatttgctaaccaaaaatttattgatttttgcatgaagcaaggtattaaccacaacttttcagctcctaggactccacaacataatggagtggtagaaaggaaaaatagaacactagaggagatgacaagaaccatgctgattgctagtggtcttccaaaaaatttctgggctgaagctctcaacactgcctgttatatcataaatagagcaatgatcagacctttgctgaaaaggacaccttatgagctactcaaaggaagaaagccctcactaatacacttgagaaccttcggttgtaagtgttttgtgcacaataatggtaaggataatttaggtaaatttgatgcacgtagtgatgagggtgtattcctaggatactcctcaaaaagtaaggcttatagagtatataataaaagaactatgtgtgttgaggaaagtattcatgtcatatttgatgagtttgatgtgcttgataaagttgtgcagaattatgatgattttaatataggtttgataagatcacctacaagattaaatcacaacaaagataaggaagatgattcagggattggagcaactgatcacaaagaattaggagatgcaaacactagagaggaggaaccacctattactaatcaagaaggagtagatgaaaaaacaactgatgagcttgtaatgaatcaaagtgaggaatttcaattcagaaagtggaaacaccaaagctcacacccagttgacatgattattagtgatataagaaagggagtacaaactagatctcaaattaggaatttttgtgcttttaacgcttatatctcccttactgaacctactaatcatatttctgctttgagcgattcagattgggtgttagctatgcaggatgagcttcatcgtttgaaaggaataaagtctggcatcttgaaccaagacccaaggataaaactgtaattggattgaagtgggtatttaggaataagttagatgagcatggctccatcacaaggaacaaggcgagactggtggctaaaggatataatcaacaggaaggcattgattatggagagaccttcgcaccagtggcaagaatggaggctatcagaattctcattgcttttgcatcctacatgggcttcaagttatatcagatggatgtgaagactgcatttttgaatggtttactgcaagaggaagtatttgttgagcaaccacctggatttgaggatcccaccattggagattatgtctacaaactggacaaagctttgtatggattgaagcaagctccaagagcatggtatgaaaggctttctaaattccttttagcaaatgagttcaagagaggtaaaactgataaaactctctttttgaaattcaaaggtagtgatttgttagttgtacaagtttatgttgatgatattatttttggtgcttctaacaatgatttggtcgaggaatttgcagggctaatgagtagtgaatttgagatgagtttaatgggtgagctgaattttttcttaggattacagatagttcaaagtgaaggaggaacttggattcatcagcaaaagtatctcagagaacttctcaaaaaatatggattggagtcttcaaggacacattacactcctatgactacaggtgatagaattcatgaagacaaggatggtaagagtgtagattgtactatgtatagaggtatgataggctctttactgtacttgactgcaagtaggcctgatatagtttttagtgtaggattatgtgctagatttcagagtaatccaaaagaatcccacctaaaagctgtaaaaaggatcctaagatatttaaaagggacaagtgatttgagcttatggtatcctagaggagctaactttgatttgtttgcttttagtgatgctgactttgcaggtgacttggttggtaggaaaagcacttctgggatggcgcaatttctcggttcatgtttagtttcatggggatctaaaaagcagaactcagtagctttatccacaactgaagcagagtatgtagcagcggctttatgttgcacacaactattgtggatcaggcaacaactttctgactttggtattagtataggttgtatgcctattttttgtgataatactagtgccatttgcatttctaaagatcctgtgttgcattctaggaccaagcatattcatatcagacatcattttcttagagattgtgcagaaactagtttaatcgaacttaagttctgtgatactgaacatcaggttgctgatattttcactaaacccctaagccgtgagagatttgaaaaattaagactggagctagggttgataaatcacaactaatatgttaaaatttcttttccccaatgattgactagtttagaaaagaacggacattcatgatatttgttgaactatctgattttctgacctccatattcacctatctctgctacatcattcacttcatataccttcttatgttattaactctgaagtgcatgccttgatattgtagtgaatttgctatgttgtgaggaataatgtgcatgtgtgttttctctgtgaggcaggcaatctagaacttgtatgattgaagctcaaggctcattgtttgagatatttcataagtttactaaaaatgatataggccatctttggtcgtttgagcctttcaagctaaccctttcagtattttatatccctagtcaccccatttgagccttaactctgatttttattgataatttacaatatgcaaccctttgtgtttaaaaaaaaaaatccttttaagtgtaggtatgcatagtttctaaagcaagtgtcatgaggtgtctggttannnnnnnnnnnnnnnnnnnnnnnnnnnnnnnnnnnnnnnnnnnnnnnnnnnnnnnnnnnnnnnnnnnnnnnnnnnnnnnnnnnnnnnnnnnnnnnnnnnnnnnnnnnnnnnnnnnnnnnnnnnnnnnnnnnnnnnnnnnnnnnnnnnnnnnnnnnnnnnnnnnnnnnnnnnnnnnnnnnnnnnnnnnnnnnnnnnnnnnnnnnnnnnnnnnnnnnnnnnnnnnnnnnnnnnnnnnnnnnnnnnnnnnnnnnnnnnnnnnnnnnnnnnnnnnnnnnnnnnnnnnnnnnnnnnnnnnnnnnnnnnnnnnnnnnnnnnnnnnnnnnnnnnnnnnnnnnnnnnnnnnnnnnnnnnnnnnnnnnnnnnnnnnnnnnnnnnnnnnnnnnnnnnnnnnnnnnnnnnnnnnnnnnnnnnnnnnnnnnnnnnnnnnnnnnnnnnnnnnnnnnnnnnnnnnnnnnnnnnnnnnnnnnnnnnnnnnnnnnnnnnnnnnnnnnnnnnnnnnnnnnnnnnnnnnnnnnnnnnnnnnnnnnnnnnnnnnnnnnnnnnnnnnnnnnnnnnnnnnnnnnnnnnnnnnnnnnnnnnnnnnnnnnnnnnnnnnnnnnnnnnnnnnnnnnnnnnnnnnnnnnnnnnnnnnnnnnnnnnnnnnnnnnnnnnnnnnnnnnnnnnnnnnnnnnnnnnnnnnnnnnnnnnnnnnnnnnnnnnnnnnnnnnnnnnnnnnnnnnnnnnnnnnnnnnnnnnnnnnnnnnnnnnnnnnnnnnnnnnnnnnnnnnnnnnnnnnnnnnnnnnnnnnnnnnnnnnnnnnnnnnnnnnnnnnnnnnnnnnnnnnnnnnnnnnnnnnnnnnnnnnnnnnnnnnnnnnnnnnnnnnnnnnnnnnnnnnnnnnnnnnnnnnnnnnnnnnnnnnnnnnnnnnnnnnnnnnnnnnnnnnnnnnnnnnnnnnnnnnnnnnnnnnnnnnnnnnnnnnnnnnnnnnnnnnnnnnnnnnnnnnnnnnnnnnnnnnnaatttattgcaatgttaaggcatgtgctttagaatgttaatttctttgcagcctttcatctttatcactttcttgttcttcattgatagctttattcatgttgctatttccatgtatccctattcctgctaaggttcttaaccattctctctatcatgattgtttgttttaatcttttcgatgatgccaaaagggggaaagaggtttgaatgccatgttatggtagattgttgtgagttattgattctagtcataacttagcaaggctagggaatagttgaaaatcattagtagataaagttgaatatcattcattcatagtgcattcatagtatatttgttcatttaatttgtacatggcattaattatttgtcatcatcaaaaagggggaaattgttggatatttgttgaaccctttatgcataaaacgatttataaagttttgatgataacaaataatgaatgtcacattattagattaattgcaatgataataattatttgatattttgaagttactaatattttggatttgatattttgaagttattgatattttgaatttatgaagatcagcataattgataagattatttgaagaatcctgaagattgatatcattcaagatgacatggaattaagaagatttgtttctatttattttttagatattatgtaaggagattagaagattgatcttgccaatatatttatctttaagattgcattcaaaaatagataaaatatttttaatattgcattcaaaaataagatataatattttaagattgcattgcgtgataagataaaatatttttaagataaaatagaatatcttttaggatttcattggataaaatcatatctttaaattagtataaatagaaacatactcttgtgtttacagtatgcattccattccaaataatattagagtttcagagagtttatgtttgcatcattgagagagttgttgtgagatcatatagaagcatttggcaagtttgattcttcaactctccatcaggatttaaaggtacctatttgcttaaggaatagaagcgtaaaggtaactattttaattgtattcttcttcttgactttggaagaggtcgcaactgggaaactaggataccagatttgtctctgttcttggtgaattgagacatgcgacttctggctgggaaacaaggataccagtctgtctctattcttggtgaattgagacgagagctttttgctgggaaacaaggataccagctgggataattgttgtgtaagggtagactaggaaactaggatactaggaactcttgtacacaaaattatcatagtggagttgtccattggattggttatccaatttggacatcgtgattttttttacccaattggattttccatgttaaaattgattgtgttctctttatcttttatcttcatattattgttttaaatttgattttaaattgtgaattattttataaaactcaattcaccccccctcttgagttcatctgggaccaacagcccagacttttaagatcataagtttttgtgcctatgtttagccaatatccaaactttatcccctaataccataatttaaatttcttttgtcactcacaaggtccattgcaattttagctttagggaactaaagtttgggtatttaaaaaaaaaaaaaacatggacggaaactaatgattttgaaagtcaaggacaaaaactaaagattacccatttttcagggtcttcaaacatcattaaccccctagtgttaatgttacgtggtcttggagttggatttattttaattaaaaaaatggtgcaaggttataatttgaaatggtgatgctgctattatttgatttctagcgttacagtttttggtggtttaatttgtgagggaaattttgttttgggtgttttgcagatcttgtgcagaaacttattgacaggagcaaacatattcttgctgtcaagtttgtttttaagttcaatcttgctcataagattccaccgattcccattttgaagctcatgtgaatgagtctcagaaacttgttaaaagactttccgaagaagttaagtcacttgtaagtatcatccccttgattggttacctgatgtatggtgtcattgcctgtatttatttgggtgtttttgcagaatgagatcatggcaagagaaatccatgcactgaaatcggcgattaaggttattgagaatcataatcttccataaagttgttgaaagcctccctctcacttctattataatctcccactcccactccttttctttcctccattcttcttacacaattgaaatcacccaagatacaccaacacttgatattgctagtggccctttttttgtagaagttcctcccataattgacctttctcttgtctctcacaaggtacatatacattagcaatagtaactaaagaatgtgtgtctctacaaatcccctccaagccaatataaccctcaccacacttactacctccaagctttccgagtttcacaaagtaatcccccgactgatccaattgctggacttgttaaactttttgcctcattatccccccacagagcattgcatagagtatcaccaattgcctgcatcttggtttcttgaatgcacaacacttgaatgttctcctttgccaccacattcctaataaactttcacttaatccttcccccaacccctgcacattgtatgtcattagtctcatatggacccttgctgcatccctcctcataacatatctttatcttttcacttcctactattttatctctcttcttcatctccaccattttctgtttcataacagtttcatcccgctcataagatacgcccctctttagcccaatatcccataaattgtttgcttccccttttttatctttcatccagaagttgcatatactgattccactatcagaaacattattactaagatcatgttgcatatccaactgtttcttcccttcttattcttcttttcttttcttcttcctcttgctacattgtcccccttgagatggtattattgaacattaccatatggtaactttgggtttgtatagaaaaagatttctatactaatttataggaaaagacaataagaaagaaaaattaaataaacttttttccaaactaatttgcaaatgttctcatattagtttcttaaaaaaaagtttaacttctttccaaaaaaggataatttgtaacttatgcatgaattaatttattttattttataggagataccgtggcagggaatatggtttgcagtaggacaacgagccccagcctataaaatcaattaacaagaaaattttccggtttattctgtttcctccttttcacctagctagtggaaggctttttgttgttgttattctatttcctcctttctcttattttcttgcaagaatcaccaatgttttagtttaacaatgctttaaagtaattacctacctttcatgccttgtactagtagcttcatcattcctcccttttctggccatatatgttctattgaaaaattagtcgtcaattattaaccccaccatttagaccactattgttcgtattcaatttattgaataaatgtttcaacatatatagcaaagcttcttctaacaaattaaatgaaattaaatttgagggttgttataaaagagagcatgggacaacctataggtggttacttgctgaatgtgatcagtctctcaacaaaaagtgtgtgagaaaattatatctattatctcattggtttccaacatgaagttcttgcaactgcagtacctagatgctacagcaagtctatctccaaagcaaaaatgaattgaaagacagctctagtttgttcatttctcccattattgtaattcaacttatttactataaggagcatctattatcttttgttaatatatggctaagaactttaaagtggggaatgcggattagaatgttaacagttatttattgatgaaattggattaaaaaaaatggccatttcaattgagagagaattatgaagatacaatttttataaacttaactgatggacagatctaatatgctatgattttgtattaaaaaatttgtgctagagaaacaacgtagaaattcatcataacatatctctagatttatgtaagttaacttcacatttgtttattgaagtttaaatttaattgtgcggcatgtttttatttatacaattttcgttctttgccattatactttctgaaataagttcagtttagaagataactcacaaattgtgacgataggagcatattcaattatttactatctcttgatttattatattaatatcttgcagcacaaatttgcataaaatttaacgattatacataacgtgtgtactttatgccgatcatgtcagcgtttatatcatatcaaatttatacaaaatgtacttcatacatttttttttttttgcctattttgctaatgtgccttaaacattatccttgacaaatttaagcacgtggatagatgaactaacaaacaaactctaaaccaagaccaactcattctctgaaggactcaactacctataactataaggaccgttggaccgtctgttcgccacataaccctctaatctggataactacgtttcccgacattgccttcatttcaaagttgaatctatctatctataataatggcatacataaatataagtcttgtattatatttataaatgggaatgctttttatacataattcttttaaaataaatataaagcagacttatttcacaccatttattttttccaaccctctttccttttcttattgagccgtcgtcgacacttttataaaacctgtaagtatcttatctgtacagataattgcaattttttacacctatagaatacatgtaacccacaagattgacaaaggggtaggactcaactgtattcaaatgtgagaaacgatttatttaactagaaaacttatgttggattttcacaatatacaaaattttcttgaaccaacggctgaaaaaattattgcaatttaacgagatacataagaaattttacagttaagaatataccttttttacctatggcattccaacttgcaagtgccaactgatgctccagaaaggaaaggttagccatgacctgttttttctaaaatatttgatagtactactgtaaccaattaaagcgacatactctattttcctttggtacccttagatgtaacattttgtcagctgttcatcgatggacctttaaaaatttattataaatatttgaaactcattctcaactccatacctattaagtatctaatactctcctttagtcacctcagttgattaagttgcgggacatgaaattgtgtttaagtttgatcttttacagtgtgtttcaatccttttttattctctttacttgtgaggctttctatgaatttttcccttcgggaaaaaaagaacaaaacagcattcaaagttctttatattaagcgatcatctggagtttctttagaatatttaaaataaaaaaaataggaagaatacaagtcagctcatattttgtaagtttacttctagtttgttccttaaactcctaacaggaaagaagccatcatgttttaattatttgtgttctggttggggggcggggagaacaggtcattactggacccataaaaaggctgacctctttgtatttaagggggagaaattgaaagagacaaatgtgttaaaactcctcttaaaaaaaaaaaaaaccgtctaagaacataaagaggaaaaaaaatctcaaacgaagaatattatgccgagaaaaacagatctcagtgtggcctgaggggggaaaaccgtgaggatacagatcctagaaggtcaatataatcaaactaaataagaacacgatttatatttgaagaattttgatccattaaaccacaaggaatcaagtatttaaataagaaagaatagcaataaacagtcacacaagaaattcccttgaaactacttctagtaatggataagcattgatcaaatggcataacaattttatataaaaaaaagaattgtgctgcttaatcaatgacatctactttggggtccacttgctagagaaaatacatccatccgtagagaaaagggggttttaaatttatattatacaatataaaaattcagcatccttcgttcaacgtttctccaagtcttccctgatctagaagttggaactcccgttcaaatctctggattaacctgaactttgttctttgcaacatatctcatcctatccctaactatattttgtaatattggatagtagaagcatttcaaatgaataaaataattaaataaataaataaactttgtcagaataaccaagaagcattgccatggcagcccttgctcatgctaccatctgctcctgctctatatacagctgctccacccatggtgaaagcatctctttactgagatcatattgttgcttctcagcaccaaatatctcagacctctcggagggaacatctttaaccaatgaatgaacccatgagacatccggctcagcaccaaattctggctgtgctatgggggatgcagttaccccactgtttctgaacccaaaggaagtagatttcctcagcttgttcagcttgtctccatttacaccccaatccagtttcccggtaggggaactccaatctgaaagggtagaggagaccctgcaagaagggttggaagctgaagacatcccaagatggtgggttgcagctccacggtcaatgaaactttggcttcgctttgcgaaggcagcggacctggaattcatcactgcagttgccacagcagctgatgagtcaaacccaaaagctgagggcttcctcagaggagaggaagggatgttggatggataactcgcacggaggtggttcatgttttggcgcatctgaagcccactttgtgtgggtgttgaaggttgcacagaaagtccatgtagttgagataatacagaagggtcagcagatgctaacaggtcatcaaggttagtaggattcaaatcaacaatcctgttgaattcctggctccgaaaagatggggaagagatcctggcaatttcttcgatcaattgttgttgctgctgctgttgttggcgagcagggctttctagaccgagcagttccatctccatctccagatccctggcactcaaagcagccttcagtcggctaccagggagctgcaacgatggtggagtaaggtttattttgttctgccacaagcttccactcttgggagatgaagctactgccaagggagacatgggtggggttgaaacacttggcatcggcaaagatgtggaactaagagccaatggactcatcactgtcatgtcaagtccactagctgaataggattttggtgatggcatagccgacccagtggaagcatacacagggcgtagctcttcaggtttgtgagcaaagaagcagacttttctagcacagcccgtctcatccttgcaaagccttgtccggtattgggcgggatgtagccaggactcaaaaacaccatgagcatactcgcaggaatcacccttctggcaggtccctttgcggaactctgggcaaggaacacagctgtaagggtatttccgtgggtctctcctcctcgcgttctcccctggatgaacgaatggacactcggtccagtcatgggagtaagcccttgagcaaggcttcaccttgaagttgtacatcctaaactcatctgttccatatacaccgttgttgatgtcaggcagtgatatatcaacagggtattctttcttattatcacttcctacttttttctctggaacagaaaacatctgtagctccatctcctggctcatgagttcatctctttccccaccacccctgaggaacatctccatagccttccttcgcgatttggacaaagaatcaaaggcaggagcaatcagattaaccggcttgttgccactcgcatcaaggcactcagcatcagccccagcatcaagcaagagcttgacaatctcaagtgaggattcggagccaccagcaacagcacaatggagagcagtggccctatcagaaccacagaccctgttcacatcaacacctcctcctttctcaagcaaaatataattgagcaccttagcgcttccaaacaaagaagcaatcatcagaggggtcctcgtttcagatcccatcttctttgacccaattcttctaccataccataagcctgcctcgttcacatctaagcccttttcatccacctctcttttgaaagcctcataatcatcagatgcagacaattcaagcaaaaccgagttgtagagaccatccagattctgcttctgaatgttacgactctccatgacgacgagggttggggaagaaagtttacttttcgaatcactgcacatgatgtcccaaaacctgcagaataagacaacgtaatctcaataagcctttcaatttataatttattattcacacagaataaagaaaaacgataaaacctcaaatttagaaatagagtttccaaaccctagttcaaaatccctacagatacaaagctaagcaacgtccccataaaacgtgttaataccaattttaccaacaaaggttagatccataactaatcctatccaagacaacagcaacttggtattccaataaccttaataaggaactaaaaggaagaaaggtgggtcggagccaaaacatgcaactgccaaaacctaaaaccaaagtttgaaactttaatctacccagaagcagacccaagaagcatattcctcagacccacccaaaacaaccaaagatctaaacaagaacacccaacaacaacaaaaaaattatgtatgagtcagtaaaagcacggaaagaaagacctacctttttgagtagagtagacactggaacaagtattttggttgcaagagaagagagtgttgtgttgtagaaaaggaaatcgagaagacctcgattgagcgaagaatgaagaagagggagaaagggttggccccttttattgtcagcacagcacagcagcaacgggaaagccaaaggaagaagggaggaaagtgtgacttttcttctcattcttctctttggtcaaagtcggcggcttcttccaatgtgagtggtaaaaaattgaatggctgaggtctttttattttttattttttatttttaaaataatttattttggttatgagacataataaattagtcattaaaaatgtaaaatttaaatttagttttaaaatgtgtgaacgattaattacctcctgaataatttaataataaattaattctttaattttgtaatataatattaaaatattcttaaaaatataatttattattaaattaatcttttaagtgttataatataataataaaatattttcacaaatttacctataacacctatctatttgttgtttttttcacattatggtcgagaggtcagagaaaggcaacttcattaacgggtaaaattttgattgtttttggttaaaaatgttttttttataataattagttttgtctatgaaaatgtgaaagaatgacaaattaatcttaaaagataaaaatttaaattaactcctaaatgtataaaaatgtgagaaattaattctttagataatttaataataaattaatatctaaattttataacttaatatcaaattaatttttaaaaatataatttattgtaaataaatacttaaataatataattaattataaaataattttatgaatttaataatttatcgcatttacggaaactaaatttggaatgaattgcatattgtgagtggtggaaggaggtggtcggagagtggtggtggtggtgggctgtgggtggcagggagttgacgaaataaagaaaaataaagtaattgttataaaacattcaaatgtaattagaaaataaccgattaagtgagtttcctttcttgaatctcagcccaatattttagttatatatctaatgataaaaattaatgccacttcaccctagaactatactagtagaatccatattcaaatgcagctagctcaaaatctttgcatacaacgaacttcattttagtaatcatggatatgaatatgcaaagagttataatgggcgataaagcctataaggtttgaagaagatgcaaagagtgtgagttttaggcgcgaacacaatcatttttaaagtgaccattttcatagaagatcattgcacctcacacatttatctcatacagtctttttaatatttgcacatgcagaatctttaaaatctgtttaaaaaacaaaaagaatctttaaaatctaaacacgtaaggtatatatacataccacacaattatattattgcaagaaagttaatgaattaaagactatgttcatgaattgtgttgtccatgtcatgactattcacttatcattgaatttttttttatcagccattcaatatttatatgaattaaaggatcttggacaatataatggctgtatttgataataaaattatctgacatcaaatagtatatttatataattttttatttnnnnnnnnnnnnnnnnnnnnnnnnnnnnnnnnnnnnnnnnnnnnnnnnnnnnnnnnnnnnnnnnnnnnnnnnnnnnnnnnnnnnnnnnnnnnnnnnnnnnnnnnnnnnnnnnnnnnnnnnnnnnnnnnnnnnnnnnnnnnnnnnnnnnnnnnnnnnnnnnnnnnnnnnnnnnnnnnnnnnnnnnnnnnnnnnnnnnnnnnnnnnnnnnnnnnnnnnnnnnnnnnnnnnnnnnnnnnnnnnnnnnnnnnnnnnnnnnnnnnnnnnnnnnnnnnnnnnnnnnnnnnnnnnnnnnnnnnnnnnnnnnnnnnnnnnnnnnnnnnnnnnnnnnnnnnnnnnnnnnnnnnnnnnnnnnnnnnnnnnnnnnnnnnnnnnnnnnnnnnnnnnnnnnnnnnnnnnnnnnnnnnnnnnnnnnnnnnnnnnnnnnnnnnnnnnnnnnnnnnnnnnnnnnnnnnnnnnnnnnnnnnnnnnnnnnnnnnnnnnnnnnnnnnnnnnnnnnnnnnnnnnnnnnnnnnnnnnnnnnnnnnnnnnnnnnnnnnnnnnnnnnnnnnnnnnnnnnnnnnnnnnnnnnnnnnnnnnnnnnnnnnnnnnnnnnnnnnnnnnnnnnnnnnnnnnnnnnnnnnnnnnnnnnnnnnnnnnnnnnnnnnnnnnnnnnnnnnnnnnnnnnnnnnnnnnnnnnnnnnnnnnnnnnnnnnnnnnnnnnnnnnnnnnnnnnnnnnnnnnnnnnnnnnnnnnnnnnnnnnnnnnnnnnnnnnnnnnnnnnnnnnnnnnnnnnnnnnnnnnnnnnnnnnnnnnnnnnnnnnnnnnnnnnnnnnnnnnnnnnnnnnnnnnnnnnnnnnnnnnnnnnnnnnnnnnnnnnnnnnnnnnnnnnnnnnnnnnnnnnnnnnnnnnnnnnnnnnnnnnnnnnnnnnnnnnnnnnnnnnnnnnnnnnnnnnnnnnnnnnnnnnnnnnnnnnnnnnnnnnnnnnnnnnnnnnnnnnnnnnnnnnnnnnnnnnnnnnnnnnnnnnnnnnnnnnnnnnnnnnnnnnnnnnnnnnnnnnnnnnnnnnnnnnnnnnnnnnnnnnnnnnnnnnnnnnnnnnnnnnnnnnnnnnnnnnnnnnnnnnnnnnnnnnnnnnnnnnnnnnnnnnnnnnnnnnnnnnnnnnnnnnnnnnnnnnnnnnnnnnnnnnnnnnnnnnnnnnnnnnnnnnnnnnnnnnnnnnnnnnnnnnnnnnnnnnnnnnnnnnnnnnnnnnnnnnnnnnnnnnnnnnnnnnnnnnnnnnnnnnnnnnnnnnnnnnnnnnnnnnnnnnnnnnnnnnnnnnnnnnnnnnnnnnnnnnnnnnnnnnnnnnnnnnnnnnnnnnnnnnnnnnnnnnnnnnnnnnnnnnnnnnnnnnnnnnnnnnnnnnnnnnnnnnnnnnnnnnnnnnnnnnnnnnnnnnnnnnnnnnnnnnnnnnnnnnnnnnnnnnnnnnnnnnnnnnnnnnnnnnnnnnnnnnnnnnnnnnnnnnnnnnnnnnnnnnnnnnnnnnnnnnnnnnnnnnnnnnnnnnnnnnnnnnnnnnnnnnnnnnnnnnnnnnnnnnnnnnnnnnnnnnnnnnnnnnnnnnnnnnnnnnnnnnnnnnnnnnnnnnnnnnnnnnnnnnnnnnnnnnnnnnnnnnnnnnnnnnnnnnnnnnnnnnnnnnnnnnnnnnnnnnnnnnnnnnnnnnnnnnnnnnnnnnnnnnnnnnnnnnnnnnnnnnnnnnnnnnnnnnnnnnnnnnnnnnnnnnnnnnnnnnnnnnnnnnnnnnnnnnnnnnnnnnnnnnnnnnnnnnnnnnnnnnnnnnnnnnnnnnnnnnnnnnnnnnnnnnnnnnnnnnnnnnnnnnnnnnnnnnnnnnnnnnnnnnnnnnnnnnnnnnnnnnnnnnnnnnnnnnnnnnnnnnnnnnnnnnnnnnnnnnnnnnnnnnnnnnnnnnnnnnnnnnnnnnnnnnnnnnnnnnnnnnnnnnnnnnnnnnnnnnnnnnnnnnnnnnnnnnnnnnnnnnnnnnnnnnnnnnnnnnnnnnnnnnnnnnnnnnnnnnnnnnnnnnnnnnnnnnnnnnnnnnnnnnnnnnnnnnnnnnnnnnnnnnnnnntggaatgaaacaagttcaataagtctaattataccaataggattttgagatttattatgatcaacatcaaataacatcatccttaagaaatgattaatttatcgtactttttacacattcaaaaattaaatttaaaattttcattttttaggtactaatttgtcatcgcatcacaccttcgaagacaaatttgactatttatccaaaaataaattaagacaaagtttgaggttgaagctatgaggagatggtattataacgtgactttgttgttgttttattgttttatcttgttaactgttgttatgaattgttacactagtatttagggttaatgataggggtgtaaatgagacgagttgagttaaggtcttgaagtttgggtttggtcactgaaaaaaattgatggctaaagcttgattcatttataatcttgggcttggcttgttaaatgagttacaatgcaatttcaggtgcttcaaattccactttctaccggaccagtggaccactcttctacatcactttcaaatttaatctcaggtgcttcaaattccttcactcattgtttcacattatattctagtattcaactattcaaatatgtaggacccctctcatgcaagacaccaatcaacttcaagtatgttaatttttcattgcttttttttttttaacagtgatttttaatattgttnnnnnnnnnnnnnnnnnnnnnnnnnnnnnnnnnnnnnnnnnnnnnnnnnnnnnnnnnnnnnnnnnnnnnnnnnnnnnnnnnnnnnnnnnnnnnnnnnnnnnnnnnnnnnnnnnnnnnnnnnnnnnnnnnnnnnnnnnnnnnnnnnnnnnnnnnnnnnnnnnnnnnnnnnnnnnnnnnnnnnnnnnnnnnnnnnnnnnnnnnnnnnnnnnnnnnnnnnnnnnnnnnnnnnnnnnnnnnnnnnnnnnnnnnnnnnnnnnnnnnnnnnnnnnnnnnnnnnnnnnnnnnnnnnnnnnnnnnnnnnnnnnnnnnnnnnnnnnnnnnnnnnnnnnnnnnnnnnnnnnnnnnnnnnnnnnnnnnnnnnnnnnnnnnnnnnnnnnnnnnnnnnnnnnnnnnnnnnnnnnnnnnnnnnnnnnnnnnnnnnnnnnnnnnnnnnnnnnnnnnnnnnnnnnnnnnnnnnnnnnnnnnnnnnnnnnnnnnnnnnnnnnnnnnnnnnnnnnnnnnnnnnnnnnnnnnnnnnnnnnnnnnnnnnnnnnnnnnnnnnnnnnnnnnnnnnnnnnnnnnnnnnnnnnnnnnnnnnnnnnnnnnnnnnnnnnnnnnnnnnnnnnnnnnnnnnnnnnnnnnnnnnnnnnnnnnnnnnnnnnnnnnnnnnnnnnnnnnnnnnnnnnnnnnnnnnnnnnnnnnnnnnnnnnnnnnnnnnnnnnnnnnnnnnnnnnnnnnnnnnnnnnnnnnnnnnnnnnnnnnnnnnnnnnnnnnnnnnnnnnnnnnnnnnnnnnnnnnnnnnnnnnnnnnnnnnnnnnnnnnnnnnnnnnnnnnnnnnnnnnnnnnnnnnnnnnnnnnnnnnnnnnnnnnnnnnnnnnnnnnnnnnnnnnnnnnnnnnnnnnnnnnnnnnnnnnnnnnnnnnnnnnnnnnnnnnnnnnnnnnnnnnnnnnnnnnnnnnnnnnnnnnnnnnnnnnnnnnnnnnnnnnnnnnnnnnnnnnnnnnnnnnnnnnnnnnnnnnnnnnnnnnnnnnnnnnnnnnnnnctatatatatgatttattaattttaacaataattatctcaaaaattatattaatacgatttattattagttcacattgtaaatttttttgtgtagttatttgaaaaaattaaaattaactatgattaatgttttagaaaattaaaaaaattcataaatgtaaaagacaataaagatccatattatttacatgttatataataaatgatacagaacgaaactacaaatgtcttgtttctgaagtaaacaagaatttctcaggacaaaaactaaagattatccatttttcagggtcttaaacatcattaaccccctagtgtttatgttgcgtggtctggagttggaattttttttaataacaaaaatggtgcaaggttgtaatttgaaatggtgatgctgctgttatttgatttctagtgttacactttttggtggtttaatttgtgagggaaattttgttttgggtgttatgcaggtcttgtgcagaaacttattgacaggagcgaacatattctggctgtcaagtttgtttttgagttcaatcttgctcataagattccaccggttcccattttgaaagctcacgtgaatgagtatcagaaactgttaaaagactttccgaagaagggaagtcacttgtaagtatcctccgcttgattggctacctggtctatggtgtcactgcctgtatttatttgggtgtttttgcagagtgagatcatggcgagacaaatccatgcactgaaatcggcaattaaggttattgagtgtcgtaatcttcaatctgaatatccatcttgcctaatacaggcgcttcaaccgggccttatggtcctgatggtgtcccaatgggtcccagtggcaaccttggtcaaggtggttcgcttccaaattcatcagaaccacttatgccgtctggttattatgatagtggccctgcttttggtggttatggtcagcaacattattaccaaacatcttatcctcagtagattgagatttcgttttcttttgaatactgaactactgggttggtggcttggtattagtttctctaagactttgcacttctgggttttagttattaaaagcatagcttgctttgttgatctccatgattaaaggaaaggaaccatagattcagcaatgaaggattgtgagggaatgattagtttcacaatttttaattacttgaatgattttacatctacaagattccttttaggttattcacggtattccttaaacttttctgttcatgctcttcattcctgcctacctttattttctttgtttggtaattgaggcttagattgggtttcaaaggtaaaaccatctcaaatagaaacttccatatttgtatcactgtatcaggtgcagttttgcttgagaataacttattaaacgtgtctacactacagtttcatgtgtgcttgatttcttttctgtcatgtcctagttcataatagtaaaagaaaaacagaaatcatatttaaaggaagttatgggttaaccttatcaaaatttaataatgggattgaaagtatttagtattatgacatcccagacaacaacttttgtttggttgcctctcactgtagatagaaactcgcttttctcatccattggtttcaaggattttaatccaaaaacgtagggtaatccatccattccgtaaactttaacataaagtctaggagaattgtattgattgttctcatccatgagaccaggcatcatccccactgatgaaaaaatacaagatatttgttttgttattttgttacttccctgtatgaactgtctttgttctcatgttgaaaaatacctttcaactaggtctggtattcagatcagtttctcatctctggtttcttttctttcctttgtgttactagcagtttagttgagtatcacaagtagatgtggatgaattgatgttaaatgtcatcatggtagtgatattcggttgaatcatggtatgtatgctttggtctatagtagttgaagtctctttttatgaagcagcccaaaacaatatgtttgggttcccatcaccttgggctaatccaaggtatgtgacacacattgtaggaaaataaacttttgggctgtctgagattttttagtctatagattttgcatcatttaaatcatgaagtgggtaaaaagttcagtactgtcaatcatagaaaattaagaaatttgcctacgggagttggctcccttgatcgcactaagtctatgacaaacacgtggcttaagtttgaatctcaggtttcctaatggtgggttatttgtgagtaccctgcgtggggctatcctgaatctggatttcagcaaccattttcccgctctaatttttttttccaaaaaaaaaaaaaaagaatataaagaaataaccacattgaggctggtgagattaagattaactaatgataaaaaacaagattaagattagcatttttttaatttactatgttgtaagtacaaaatatctattgactttattgataattaatttttgtcaaaaaattgagaatcatctttaatgaaaaatattctttttcaattatgttcattttcattctctaagttcaaaatttaatattttacttaaataaactcaattacattcgaaccaacataatgttggtggaataagattagcttgagaaaatgagttttgacacttcgattatacacacactactagggaggttctctcaacaattttagcaccagctgattttgtgatacatgtttctgtacgtacagtattttgatctttaagtttcctggacgtcattagctctgtcaatgtgcattagcttgagttttaccgtagaatagttaacactaaagaagggtaagtgtatgagaggatttttacactgttctacctatgaagtgatctattacctaagaaaagatgtgtctgtattattatttggtgttgtatagattgttcctctcaccttatgagatcattgctaattggtaatgtaacatgtaagagacctcgttttctatatgtttggaaatgtttactacactgatggttgagacgtattctcagtgtgttccatgaaaatgggccgtagatgactggccagctttcttcttttttggttagtgaatagtgagaatttcattcagaagaaatggactttgcatccctaacaaggtgtaactcaccctggatgactagctttaagcatagaagttggaattggcaaagaatattaatgaatatattattgaagtctgtggtttttatcaaggggcatgagtagttttacaagatttaacattagtgggaaatacactatgcggagtcaagattttaatattagtgagcacagattgaaaagtggaatttgattgatttaaatatttgtcaaagaaaacttaattatagaatatatgcagaaatattaaataaacttaattcattcttatgttatagtaaaaaaatttagacaacatgttttagtaaatattggaaattaacgttgaatactagaaaattataaatacatagttttatgtataagttgtgttagctgttcaccgttattatttcatgaaatgaattttctctgtatttttaatttaagtaatcctctatttttgtgaggaagtttttcctacctcgttgcacgttcttgtttttattattctcattgccgaaaatataagaaaattcaaaacaaatagaggtaatttatttgtcaatacaagacaaaacaactagaagcaatttatcaatcgtaagatgggtatctattcagtttttggtaatttttaatatatgattcatcaatattttattattcaccttcggnnnnnnnnnnnnnnnnnnnnnnnnnnnnnnnnnnnnnnnnnnnnnnnnnnnnnnnnnnnnnnnnnnnnnnnnnnnnnnnnnnnnnnnnnnnnnnnnnnnnnnnnnnnnnnnnnnnnnnnnnnnnnnnnnnnnnnnnnnnnnnnnnnnnnnnnnnnnnnnnnnnnnnnnnnnnnnnnnnnnnnnnnnnnnnnnnnnnnnnnnnnnnnnnnnnnnnnnnnnnnnnnnnnnnnnnnnnnnnnnnnnnnnnnnnnnnnnnnnnnnnnnnnnnnnnnnnnnnnnnnnnnnnnnnnnnnnnnnnnnnnnnnnnnnnnnnnnnnnnnnnnnnnnnnnnnnnnnnnnnnnnnnnnnnnnnnnnnnnnnnnnnnnnnnnnnnnnnnnnnnnnnnnnnnnnnnnnnnnnnnnnnnnnnnnnnnnnnnnnnnnnnnnnnnnnnnnnnnnnnnnnnnnnnnnnnnnnnnnnnnnnnnnnnnnnnnnnnnnnnnnnnnnnnnnnnnnnnnnnnnnnnnnnnnnnnnnnnnnnnnnnnnnnnnnnnnnnnnnnnnnnnnnnnnnnnnnnnnnnnnnnnnnnnnnnnnnnnnnnnnnnnnnnnnnnnnnnnnnnnnnnnnnnnnnnnnnnnnnnnnnnnnnnnnnnnnnnnnnnnnnnnnnnnnnnnnnnnnnnnnnnnnnnnnnnnnnnnnnnnnnnnnnnnnnnnnnnnnnnnnnnnnnnnnnnnnnnnnnnnnnnnnnnnnnnnnnnnnnnnnnnnnnnnnnnnnnnnnnnnnnnnnnnnnnnnnnnnnnnnnnnnnnnnnnnnnnnnnnnnnnnnnnnnnnnnnnnnnnnnnnnnnnnnnnnnnnnnnnnnnnnnnnnnnnnnnnnnnnnnnnnnnnnnnnnnnnnnnnnnnnnnnnnnnnnnnnnnnnnnnnnnnnnnnnnnnnnnnnnnnnnnnnnnnnnnnnnnnnnnnnnnnnnnnnnnnnnnnnnnnnnnnnnnnnnnnnnnnnnnnnnnnnnnntttttttgctacagttttcaaatttcattcattaaataaattcgagaaagcaaatgcactcagccattccaaagtttgtaaagtggcaaaaaattattggataaatagatggtcggtaagatggtgagaggaatgccaatgaagttaacaactcttaactgtttctactttctacggtataaataagggattcatactttaattttatctgggaaattttgtcagcaaataagaaaaaatgttgagagagatagataaggtaggtgattttatttttggatagcatgctctgatatgcaattgaattgaatgtggcatgctttaacatttaatatagtaaaattcattagggaggaaatatattactcaataaaaaaattgtaaggaattagaaaatcagtgagactttgctttaactgcatctcaagccgttaaatgcttagatttgtcgttgttttcctatctcttcacctaattataggctaagtacacccttccttttcttatctgtctccacacaggtaaaaagtaaaaacacacaccgaatggagaaaagaaaacaaactaaaatgaaatgtttctatctcttgtgcttttctagaccatatttcattaataatactctatacattatagtagtaaaccaaaaattgagcctcaacttctttttaaccccttttagcaaaatggtatgagattagtaaagaagatatttaatagtgtgaggccaacatgttaacttattctttcttagatctttacagcatatccatgaaaatttgacaacattctcatttattgttgtgactgaaaaatacccaaatggattttttttttaaaatcagcaaacccaaatggaattaattggtcaggtcaacaattgccacatttagatgccctaaaccatgtagtattgtccaaaaacctcaaaacacaacatgattctgtgaacaaattatggtttaatccatttctctttgctacatccacttgctaatttttttgtgtcacacacatgacataacccccatgggaattgccgacagagcattccttgaattgaatcaagtgatcaaagttcaaataacatagacaaaactacacactaaggtcattgcttgagcatgactctcctattcatgagattaaattatttgaatctaaccctttgctgaaccaattctggtttggctttggttttcaacttgtggaaagggaaccgcagttttgcaccaatcactcatattgattgtgtatggtgaagagtaacatagagttggtacttggcacaccgcttttcactttcaactcttacctagccaaaacacacatcaaacataaaaaacaataattcttttaacgaatagtaaaataatcattttgttacaaaatctttgtccaatagtgaatcattcattgacaacatcatccacctatcagctttaaaaagtctaaaagttaaatctacacaaccgattaatttctctctccatcccatccgttcacgccttaattttttccaaacaaagaataaataatatatactgaaattttttatattatcaacaaatgacttacatgtattcatttttataataattattttaagagtttaatttgtaatgtaacattaatgtaaatttttttatattatcgattaataaannnnnnnnnnnnnnnnnnnnnnnnnnnnnnnnnnnnnnnnnnnnnnnnnnnnnnnnnnnnnnnnnnnnnnnnnnnnnnnnnnnnnnnnnnnnnnnnnnnnnnnnnnnnnnnnnnnnnnnnnnnnnnnnnnnnnnnnnnnnnnnnnnnnnnnnnnnnnnnnnnnnnnnnnnnnnnnnnnnnnnnnnnnnnnnnnnnnnnnnnnnnnnnnnnnnnnnnnnnnnnnnnnnnnnnnnnnnnnnnnnnnnnnnnnnnnnnnnnnnnnnnnnnnnnnnnnnnnnnnnnnnnnnnnnnnnnnnnnnnnnnnnnnnnnnnnnnnnnnnnnnnnnnnnnnnnnnnnnnnnnnnnnnnnnnnnnnnnnnnnnnnnnnnnnnnnnnnnnnnnnnnnnnnnnnnnnnnnnnnnnnnnnnnnnnnnnnnnnnnnnnnnnnnnnnnnnnnnnnnnnnnnnnnnnnnnnnnnnnnnnnnnnnnnnnnnnnnnnnnnnnnnnnnnnnnnnnnnnnnnnnnnnnnnnnnnnnnnnnnnnnnnnnnnnnnnnnnnnnnnnnnnnnnnnnnnnnnnnnnnnnnnnnnnnnnnnnnnnnnnnnnnnnnnnnnnnnnnnnnnnnnnnnnnnnnnnnnnnnnnnnnnnnnnnnnnnnnnnnnnnnnnnnnnnnnnnnnnnnnnnnnnnnnnnnnnnnnnnnnnnnnnnnnnnnnnnnnnnnnnnnnnnnnnnnnnnnnnnnnnnnnnnnnnnnnnnnnnnnnnnnnnnnnnnnnnnnnnnnnnnnnnnnnnnnnnnnnnnnnnnnnnnnnnnnnnnnnnnnnnnnnnnnnnnnnnnnnnnnnnnnnnnnnnnnnnnnnnnnnnnnnnnnnnnnnnnnnnnnnnnnnnnnnnnnnnnnnnnnnnnnnnnnnnnnnnnnnnnnnnnnnnnnnnnnnnnnnnnnnnnnnnnnnnnnnnnnnnnnnnnnnnnnnnnnnnnnnnnnnnnnnnnnnnnnnnnnnnnnnnnnnnnnnnnnnnnnnnnnnnnnnnnnnnnnnnnnnnnnnnnnnnnnnnnnnnnnnnnnnnnnnnnnnnnnnnnnnnnnnnnnnnnnnnnnnnnnnctcaaatttcatttcatttaaaggtaaaatataatttaatcttcatttccctccttttttatcattgcgagcataaacattacaataaacacttaaaaaaagggaaataaacataagttataacaaacataataataaacataatattgattaataagtataatttttctattgcgatgaaatttttaatgtgacagtaccttaccaaaaatattataatagtacaaaaaaattgtaatactagaccaatcatttcattttggatacggtactgtcacattagaaatttcagagtaatatatagattatgactattaattaatattatgtttgttttaacttatgtttgtttttcctatttttttaagtgtttattataatgttatgcttggaacgataaaaatgggaagaattgaagattaaattatattttatctttaaatgaaacgaaatttcggatttgacaaattagtctaatgaaaacttattgacattttgatctaatctatttagtagtcatgttagataatcatttttatcacatttttgttcttatgtgtcatgtaagttcttttattaacaataatagataaaagttaacgtatcaatatatttgttacattttttttattttgatgattaaaatttgaatttccatattttaaaaataaatttattaatattttacatatttaaaagtgaaaataactatttacacttaacttaatttacatagaaccaaaaatattttcaaaatcggaatgaatccgatccaaccatgaaaactccttaaattcaacatcaattattactatcatgatgactttttttttatgttgtgagtatagttactcagaagtaacaaaaaaaaaaaatgttagaaagggtttaaaatgacagagaagagagtcacagatgaatgaatgagttgtgtgagaaagagatccctccaacgttgcaagtcaactgagagtcctgctctgctctcccaaacatctctgacacaacacacaccaaaatgcatcactgaaatgacccttttgcccttccttccctccctacttctcctttgactctccgcaacgccaccgcccacaatggacgccgccaccaactctggcgaaccccgctccagttcggtgctccaaaatactggggcatccgaggatccgaatcgaagcgggtcgggccagaattcgatagcgaggtacaagctgttgtcgccggcgaagcttccgatctcgaggtcgccgtgcatcactattcctccggggctcagtccgacgtcgtttctggaatccccggttcttctttccaacatgaaggtgagtgtgagtgtgctcatttgaaatcttttggtttcagtgaaaaatggaaacaaaatggcttgtgttatgagggagaattttcatttttcaaaggggtttgtgttttctgagaggaaatggattagaagaaggaaaggtaaatgcttgagtgaattcattgggggaatgttgttgtttttgagttcattttggtcaaaggttttttttttgctgttttttatttttacttgacccatgtaaggtaaaggtcacttattgtgagtgccgtatcaaagttttgttcttttcactacgattttcttggggtttctcagctactcaatagggcttatctgggttggtgtcaaatcttttttttttttttggtggaataatttgatgacttaaaatgacttgatttgaatgctgattagcaatgagctgaagatgctgttttttgttttgcgaaattcgaaattcttatatgctggtttagtctcgtggcacattgtttctttagagttggctcttcacttgtttgattttgatccttcacttactagttcatttgtgtatgggtccgttaggttctgatgcttttgctcttataggattatgtattggctgctttatgctcaaataaatacggtgctctgtttagtggaatataactttagcttaggatcgctcgacattctccttttatttattttagtgtcagtgttgttttttcacataatgaatcttcttttttgttggtgcttgccctttttgtttgtttttgtttcaacggtgcagcagagtgcaatgaaaagtcttcttcttttcctttactatttatatatgtggaacaaacgaatcaatgcattgccaacgattcgtggattgatttaagttatttgtgctgtgagaatagtataaggaatgccagaaagattgtgggtctagattttgtgggacttgtttctagacgttaatagtctggatggtcctaatttgagtagaattctgtgctacattcatgtgtgagtgtcttttctttgttatgattgattgtttatataactaacttttgcatattataatgtacaatgctatctttgtcaaactgactccaaataaacaacatgcaatatcatcagcaggagaaaatggagaactttgcttacgctcagttataatgggttgcttacatcactggctgataaaactgttcaactagttggcttattcataagattatatatatatatgctctctttccgctgttattgctgatatcataggttgattgaggccttagggtttgcaggtattcaggaacttgcttgttttggcttttcccccacctctttttattgtttttttgagatttttttttttccagtatctttttgtgcatttgaatttataatttttcatttgactcaacaacagttgctcaaagaatattatagtttaaatattatttgtgtccatgcattgcaggtggaggcttcaccaactacagggtccctccgtaagctccaaccaacagtacatggttctatggcttctgctgcctctgctacatttccagtaacctctgcctgcttcaataccaatactgttgatgacagaaaatcaagtttctttgagttcaaaccactgaatagatcgaatatggtaattaaaatcgatgttggcaacactttgattaatattactttcaaatcacatggatgaaggggcttggattttgtttccctttctcctgtgactttacttggtttaaatctggatactaagtaaacaagatggaataattaatcagatttgaaagttgtcaagattgttgttactcatcactttgtcgcattagacaaaatcaattcctaaagtcatgtttcatttaagtagttttataatttataatcctttaaatagatattttttggggggttaaagtgttaaatggaaacaaattgcgttgtcatgtttcatgttctaattaatattgttttgaatattactaattgcctagcacttatccaatactattcactcgttttaaggttcctgcagacttcaacaaccatgtaagtaaacaatctactcaagtagaaggtccaggaaaaactcaatcatttgcttcctcacccttagttgaaagtgagatagcagttccttctaatgaattaagcctatcatcacctgtacaaaaggttagttctagtgctagtgctcctgttgatgttgatttggatgacattaaccacaaaggcaacacagctactgggcttcaagcatcacatgttgaggttagaggcagtggactttcagttgctgctgagaaaacatctgatgatggatacaattggcgaaaatatgggcaaaagcttgttaaaggaagtgaatttcctcgcagttattacaaatgtacacatcccaactgtgaagtgaaaaaactttttgagcgctctcatgatggtcaaatcactgagatagtttacaagggaacccatgatcatcctaaacctcaaccaagctgccgatactctactggtactgttatgtctattcaaggagagagatctgataaggcttctatggctggccgagatggtaataccagctatctatcttagcttccattttattattacttattgcaaacaaaataactggctttcttttcttctaattcttgaattgtagacaaagcatccactatgtatggtcaggtgtctcatgctgctgagcccaacagtactccagagtcatcacctgtagcaacaaattatgatggtttagagggtgccgggtttgtgtcaaacagaactattgaagaggttgataatgacgatcccttctcaaagcgaaggtatgacaatttgcttgaagctctggattttctccagcaagtgtgctcacttgctgctgctgagtttctttttttttttttttttttttgagcagaaaaatggaacttggaaatgttgacatcactcctgtagttaagcctatcagggaaccacgggttgttgtacaaactttgagtgaggttgacatattggatgatgggtaccgctggcgtaagtatggccaaaaggttgtgagaggcaatcctaacccaaggtatgtcctcacgttgatgaaactaagaatagaaattaatttagaaattccaatttaatgtacgtgctttgtcaaatgaacttttttattaatattgtaaaatgtcaagttttttctgttgtacttgctgtctatacaacagttaaagtgaggaatcaacttgatataataatttattgaagcctatatattcacttatcaaccattttgctttgcaatctgtttcttttattatcatgggttttagtatagtctgaggctttgagacccctgttgcagctttgtagccaacatggtctataaaaaacagtctgtatcttacattagagtatattccgatatacagacatgaaggatatatatatttgcaaaaaatggagggaatttttggtaaacaccaacttttgtgggtttaagaaatacaaggaataactttatagatttgttttggtaagggatactgagatggacatatgggtgaaggttgatgagaaccggtggggatggaggatcttaaaaaggaaatagagtgattaaatacatagtaattaagatacaagttggaaattaaaagcatgatttctaaaagtttgcaaagaaacagtggcaaattaaagtggcagtagattattagatataggaaagtattgtggaatagatgttgcttccaaaggaaaggaatgaatattaattttgcaaggcaatacgaagttataagaaaacttagggtggggtgaagaggaagggcaagaagatattcaggcatcattgcaatttttatactcagttatgaagatggtaggaaagtaggattaccatcctgctggttttcatgaatgactagtgtagctgatcccaatgttacaactaagcctgcttattgatgtcattttataatgtcattgggcacttgtgaacaattagttataaatagggctatattcacctaggaaatgtatgtactaacgctttctatttcatggtgacaatcattactgtggatgccataattacagactcaaaaggttacttctcatgattccagttatattagtgtgtcgctacttcaggaaatgcttgaaagaatggaattaaaatcaaatgtgtgcttcgaccttgatgaatgaggcttgtttcatgttaatgatccatgcttaatgatactaactcgctgcagtgctaaaatatgctactcaactacatattttttgttaatcttgtatcttactatgcttcttattcaggagctattacaaatgcacaaatgctggttgccctgtcagaaaacatgtggagagggcatctcatgatccaaaagcagtgataaccacatatgagggtaaacacaatcatgatgtaccagctgcaaggaatagcagccatgacatggcagtaccagcagctgcagcaggtggacagacaagaactaagttagaagaaagtgataccattagccttgaccttggaatgggaattagctcagctgctgaacataggtcaaatgggcaagggaaaatgctgcattcagagtttggggatacacaaactcatactagcagttccaacttcaagtttgttcatactacctcggctccagtatactttggtgttctaaataacagctcaaatccctatggttctagagacaataggagtgatggtccatctttaaaccgttcctcatatccatacccacagagcatgggaagaatactaatgggtccatgaagttgattacacaacagatattaaataaaaaactatgagtaacaatttgctttctttttccttatttttggcgggtatagcttcaaatgtgtaacattgcattttctgtaagaaaatgcagatagttcttttatgtttatatcactattccatagcttctgtttagtagagttggtagcagctccatcttgacttttaaatctaattgccgtttgtaattgtataattataaattataattatatccaaattcttctgtataaatatgaagctgatatcaaagttacctccacaaaaccttagtccccactgcactggttacaagtcgtacataacccgtgattgatgacctgttttgacatggtgaaaattgaagtgcaccgtgcactaaatgatatcatgaatttgtacatgttggatattctcactgttttgtgtggattggactctctaaggccattttcatcctaaacgcctcattttctactttttacacattttaaatgaaatttcactatcatcatttatttaactaaataggtctcatatatgatgtaacctcgtggtccttacatttcatcaacattaacattccttttgtgtgggtcttgttaattagtattcttagggtattgattaaagaattaaaaggaagaaatatttattgtataaattatagaagagagtaaaaaaaaaaaatcatgaataacataattttttatctctcaataaaaatatttttattttaagttccttaatcaatatcctcatagcagtgattaacatttatcttcttttattgtaaatacttattttaccatcttgacctcacacagaaacaagcacatgcttaaataagtatccgatgtttgttaagacctgtgatcaatgattgtcttaataagatgcggtgcttaatgagaagatttgatgttaccattgcatatcaagatggcctaacacgatttttttttattttttattttaataatatgattgagagggatgtgaatatagataaatgtgtcaattctctattcacatacgaaaaactcggtggatgttatactcttatacgtacatatgccttatcctcacagacattaacaattaaatcctttggtttcagcatacaaaaggacacggtccctttcaccctgtaatttagggagggggaccgcagcattggcaaatgtgctgcacttgtttccagaaaactgaatagaagaaaaaaatggggatttttttctttgcatgttcctagtatattgcaataacattaatttagccactgtcatatttcattgccacttctcaaggtgtgattagtttagcgtagtagtagtatttggactttgaagtgcattcaagaattttgctagaaagagaaacacaaataaaaggtgatggagccaattgaataattatgctataactgaacgtactagcttggtggaagagcaaaatgaatttaacactatttttgcaataaatatacatcttgcattttggcacgacatttgcttagatataggatgaatttcttgtattagtcaatcggcattgggatttacatactgccatacttggaatattgattgagtaaatcctttatgacgattggattctcttggctttatctttgaacaattctgacatgttcacgttggtctttaattgcagtgcaagtaaagtacaactttcttaaattcatatatttgtcttagcttaaccacgactgaagaatcatgcagccacgttgtgtcctatttatggaatcaagatgtatggattatgggctgatccttaccatgagcacaattctgtatccttactatatcatcatcatctagctagaacccattatgattttttttatgctaacgggaatggttcctgtttttaaagaaataaacaccaaattagagataaaagaaagtttgatctcttgtttgctttattatttatcatataaatggaaaaagcaatgctagtgacatgactctttataccaaagaaaaaagccacaaccatgtttctgtatgattgtctttaatatgtgaagcgacttttcagaaccaatatgcaaacagatgatattctattttgtctttagacttgagcatatcactttttctttttcataaatgaaaagagaaattatatatatttgtacaagtagtttgtaattttttttacaacagatagaggtaggaatagaagaaaaatgcaagataaatactgcggtgaagagaaataaagagaaaattgatattgtaaaaagtgttgtatgaatgatataactcaagcgtaagattaagcccaaaaaattatatgttaggaacatatttcatgattgaactggtgaagttaatcttgcttttgcaaaatttgattagctaggcatatgatatggacattgtaactaaaaatcaaagaactgcttgcctcaaactgacaaaagaacaataaatgactaaggagagtccaccgtagtcttgcctttctcaagcattccagagcagacgtttctcactcatttttaaaacagatccatcatctgtgtcctatacggacagaaggaaaaagaaaaggttgaaatatatttttgtcctaatgctacatgtattttaattcaaaacttgtaccaaaagaggttttaatttcttttaatgttattttctttgttgccgttacaatgcagtaaaattaacacacggtcattgtaaaatataaaaactaaattgaaaacaattatgcctaaaaacaaaatataatcttttatccatatacataaatttcaatttggtctacagacagcaagaaataaaaacaattatacctttaataaataaactaattttttccctatatgtataaaattgaaaatgagtttagtgaacaaaaatgtacgctctgttttttgtccctcaattttgtgcatgttactgagacaacaaacttgttcacaagaagccattccttttgtgctcatatatttcaatccacacagggaggaagaggagcgaaaaaagagatgcatgccatatgggtctccttgaaggataatgtcaaatgtggaaacaagctcaacgatgtaatcaagcagcaaacaaaatgcggcaaaggaagtggctatgttgcagaaaaggagaaaatgaatggatataatagacctctaatggaaactccaactagcctagtggtttcaagaccaagcaacacactgggaaggcttcatggtaagttactaagttgcatgctgctcctatttgcatgaacacatcatgcttttgtcttcaaaactcagtgtaactcggtgtgtcatgataaagaagtttgaaatataagaattatgatttttcagaagtccttgtaatgtaacgggcttataagaagaaactagctagagcaattggtttatactttcttacttcatcctttctttcactatctatatgttttgttctactaacttgttaatgtcattataaaattatggcagagcttagtgttggagacccatcaagaaaaattgtggagatgatctttcaaaaagcttggtttaacaaatcaaagccactgaagaaggttagaacagtcctcagggtgagttactcagaagaagtccttgaaaggtttgagaagtatagagaatatgtcaagaaggaggcctctgagcaaaatccaaggaatccaaggagcacagttgatgggaacgaacttttgcggttctatggtactacaatgagatgtttgcaagaaaaatctgataagaaagttcatgatctgtgtaaagatccatcttgttatctttgtcaaataattcagtttaatttcaacacacgatatgcagagattcacttgaatacaggtgacaaagtgttgagaaacagaacaactgccactgccagagtacataatgtgaaaaaagctgcaataatttgcaggataattgctggaactgcagtaaatgaagttgatggtgaatatgaagggtctcactcaactgggttaggagaaatgcagtttactttaagaaaatttgtagtaaaaaatcccagttctattcttccttgttttgtaataattttcagctaacatgttttgtaggtgtaaattgtcattattcttttatctttgtaaggcgtgtcatagcaaaatatagaatacatagtgctgcttgccattttttcttttttctactttgatgagatcgagcttgctggttctagcattattaacataaatcaagtatgttattttaacaaactatagagtaacttgactatgaattccgcgaaagaagattaggatgatatataaactaactaaaagtctgaaataacaaaaatgaaccagttgtcattggatcatcacctccaagcacaagtggtaataagaacttgattcatccaaccaagacatagagccccatctctctcttctagagtgtaatgtccttggtagctttgctgaagattttttattgaacaagtaataaaggagttcaatggatatggtgtgaatccggccatagtgaaacgtgatctccacttcttcagaagctcgtgacgttccactctttctgccccttcacatgctattaagttgacaacttctcgagccaaacaatgctgctccacattaatcctttctttgtgctccctcggcagagcaacatcaattgattcaaaaatagccaagtagtagttcattgtctcaacaaaacgggggaagaatgggaggttgttggtatgtgattcttgctcaactagtgtcacaatcttaggagacaagcactttgccaatctcaccaaccggtcacgatggttccgactatccacacattcatctggaacatggtgcaacatcatggcaaagttcacagcaatagcttcaccaggttgaagtgcaaggtctttgagttcaacctcagtgggagcagctcgtatagcatggaactcaaagggtacattatatgattttgcaagcgttgataaccttgctccaacaatttcaaggcctccttccctggcataagctgaagtggagtcatcaaaacctgttattctaatcttggggggtgctccaggtctgccagcaacagcttggattaggcttacccactgaattccctggttaatctgaaaatcaataatgtggacttcactttcctccttcatggcttcagcaatagctccatttgctgacatgtaaccaaatttgagatatggacagatttcataaagtagatgcatgtgtgaaaggagttcactaccagtaggctctttacatttcaagactttgtagattgtgcttcctgaagaggccagccttgcaacaagagcctccaacatgtatgctcccaatcgttggattggattgcccgagacggagaccattttacgcaactctgacatcaaccattcagttgtctccatatcatttcctgccactgcttttgcacatgtacaaagcatctcttttaaatcccctctagatatcatttccatcattctcttccacctttctgcctctttcaaaaacgaatcagattcttctggaattatggtatcataagtatccagaatatctgtatcatgtcccaacatagcactttcaagctctcttatcttgtgcctcagctcatcatcgttaagtgtcaagcaagattcgttttctagcgaatcattaacaatttcaagcgaattctgggaactcaacacatttgattttgactgcagctttgagactgggctattgttaggtgagaaactgacagtagatggagaatttagggaagggaaattgttgtttgtagaagattccagggtgcaatattgttcgaaagtacaaacagaagggtaggttgcatggctaccgttatcagaggatgagtagtagtctaggttcccactttgcaggaagcaacatgaccccagattttgcacaggctcaatgccgaacctgctagagtcataggacattttatgtttctgagacatttgcatttgaaaagtaactggtactttgaatatatgcaaacaacaccaaaatgtttttctggtataaacactcctgaattttctgatttctctatttttttgaacaacaaacaacaggaacttctatttatggtctgtgatcgttgtccacattttactccaattccagctggacatgagcagtgttctcaaaatctaagatattctgcagaaagggtaacacaacagtttaagcaacaaacatagatagcaaaataatagaagctataaccatataaaacaaaaaggcagtctcagtcctgatggaataagaagcaggtagtattgaggctattgtctaaaattggtattctttgatgtcaggagttaaggaatatgtaatatattactcaaataaaggctagaaaccaatatgaacagagttggattatttattgaaggcataagcaggcattttaaaactagaaaaacaaacttgtatacaacatattatattttccagatattatatgctattccaactaacagcacgccaaagagagtctgattttcataatccacatgaacagaatatagttcttaacatccgaacaaaacagcaattttatcattttatttgaatctttttataatcagtctcttctttagcttttcactttccacatgttattgtttttgtttgtgctttcaaatttgatgcaatcaataaatggagattgacttgataaatataactagataatgaattttggagcacttgctgctacataaagggagaccctttnnnnnnnnnnnnnnnnnnnnnnnnnnnnnnnnnnnnnnnnnnnnnnnnnnnnnnnnnnnnnnnnnnnnnnnnnnnnnnnnnnnnnnnnnnnnnnnnnnnnnnnnnnnnnnnnnnnnnnnnnnnnnnnnnnnnnnnnnnnnnnnnnnnnnnnnnnnnnnnnnnnnnnnnnnnnnnnnnnnnnnnnnnnnnnnnnnnnnnnnnnnnnnnnnnnnnnnnnnnnnnnnnnnnnnnnnnnnnnnnnnnnnnnnnnnnnnnnnnnnnnnnnnnnnnnnnnnnnnnnnnnnnnnnnnnnnnnnnnnnnnnnnnnnnnnnnnnnnnnnnnnnnnnnnnnnnnnnnnnnnnnnnnnnnnnnnnnnnnnnnnnnnnnnnnnnnnnnnnnnnnnnnnnnnnnnnnnnnnnnnnnnnnnnnnnnnnnnnnnnnnnnnnnnnnnnnnnnnnnnnnnnnnnnnnnnnnnnnnnnnnnnnnnnnnnnnnnnnnnnnnnnnnnnaaactaaaaataaaaaataagcattcaaatacaaattcgttcaaagttcaaacacactgagacacagaaattctgatcaatcaccctgttgattcaacaaaacctaaactgaaaagcaagacaaaaaagtgaaaaataattactataaaccagagagggatcaaccttggaagtaattgctcccggttaaacgtaccattgttaaaagttaatcagcaacccatttttacaagctcaataacttccataaaagtaactttttttcttctctgataaataaaacaagatgcagcatctccttcaacttcaacatgagcagcacaaacacttctataatctatatggtaaaaaagtaaaaccacttccctcacacaacatcctcatacaaaacaagaaaagtagaaaacaagatcagcacaattttttcagagactctcaccttatatgaaaaggaaagcatgatctgaactttgaagccaaaacaatagagaactgatgcaacgaggaattggcatgcatgtgggcttttgtttttgtggttttattattcaaggttggaggcaaagaccaaatacaagnnnnnnnnnnnnnnnnnnnnnnnnnnnnnnnnnnnnnnnnnnnnnnnnnnnnnnnnnnnnnnnnnnnnnnnnnnnnnnnnnnnnnnnnnnnnnnnnnnnnnnnnnnnnnnnnnnnnnnnnnnnnnnnnnnnnnnnnnnnntgaataagtcttgttctcgccccccacaaaattaccactaagcggattcaatcatgtttatctcccaaatttgtcctttactcgttgtcaataatcttataaagttaacttcgtgttatttctgttaatcacctcttaagcagttaagcattccattttatttcttcatttttttcaaaacataattttttacatgctcttttaacataaaagataaagaatatttttaacgcatcttaaaatcgttggttacaaaataaaatttaaatgttttcctaaaatgaaaaaataatattaataatgttaaatatttatattttttaaaatatgtaattggttagaactgaattagattcaaaaattttaaacaaagtcttgagtttgagaatcaagtcttatgaataaagaaatacagattaagaaaagaaacttcattaaaaataattaactaatctttttgacagattattcataaactgataagcattaattaatgcctaataactagtctgaaacctctgttttatttggattccactgttccgaatacagacgcacgtgcatgacacgtaaacattaattagagtgcaagcaacgatctcagttatacgtcatctgataaaaaatgtgatttaactgtcaataactttacttttaaacttaacaaatcgtatctgtaaaatagactcacgtgtgaaggagaagaaaaatcatgtaaggagtcaatatatgcatactttgatgagttaaaatgagtattttaaaccattttccagaaatttacatagcggtttcttacattttaatcttaattttaggaagaaaagtgattttttccccatcaacatgaagatttttatttagtttggtcgtttgttgacgtctcttgttttggcgcgtgtaattgaaaaagaaaaaacaatgaagcaagtgtgtcggtaatggtatggtggttgataacattgccccacacggttttcgtcatttttagggatggaaattaggcattaattagtattttttttattgactatatttatctttcaccgtaaacaattcgagttacaataattatgaatagcaaaaattttccttaaactcaaatcttaattaattaaattgaaacaatcacatgtgaattgatagaggccctcaatggtaaaattaattagtataataccatcaataatctttcttctccccattttttatagatgcagatatgcgtcatttataattgcaacaataagagcagtttttaattaaacacaaacttgacgcgtttggcttcaaccactttcacgagcaatcacacccacatgcataaatgtatctttatcttcttaaagtacgttctgctgtgtttgtattgttcctttcgagtgttgcaaaaccaatttctttagatgctatccaattctggaagttgagttggaatttgaactaaactggtttcactttgttcttttctgtttgtttcaattcaacaccaacatgctgcacaccctgattgttcacgtcataaatcgtaatataggatgacatgaattccttgtcagccatacgtcataaatttttggtggttactattttttttcttcttttacttaaaaaaaaggaagaagaagctccatgaatgcgtttagaactataattctgaaagtaaaaatagaaaatgttttataaaaatctttgttatattaaaattacaaatcatctaatatgttttaaaaataattagaagcaattactagtaataaaaatgttttaaatactcaacaaacttgttaaaatgtcacattacaaatttgaatcctctctaataaactttccagattcaaattactactatctagtacnnnnnnnnnnnnnnnnnnnnnnnnnnnnnnnnnnnnnnnnnnnnnnnnnnnnnnnnnnnnnnnnnnnnnnnnnnnnnnnnnnnnnnnnnnnnnnnnnnnnnnnnnnnnnnnnnnnnnnnnnnnnnnnnnnnnnnnnnnnnnnnnnnnnnnnnnnnnnnnnnnnnnnnnnnnnnnnnnnnnnnnnnnnnnnnnnnnnnnnnnnnnnnnnnnnnnnnnnnnnnnnnnnnnnnnnnnnnnnnnnnnnnnnnnnnnnnnnnnnnnnnnnnnnnnnnnnnnnnnnnnnnnnnnnnnnnnnnnnnnnnnnnnnnnnnnnnnnnnnnnnnnnnnnnnnnnnnnnnnnnnnnnnnnnnnnnnnnnnnnnnnnnnnnnnnnnnnnnnnnnnnnnnnnnnnnnnnnnnnnnnnnnnnnnnnnnnnnnnnnnnnnnnnnnnnnnnnnnnnnnnnnnnnnnnnnnnnnnnnnnnnnnnnnnnnnnnnnnnnnnnnnnnnnnnnnnnnnnnnnnnnnnnnnnnnnnnnnnnnnnnnnnnnnnnnnnnnnnnnnnnnnnnnnnnngtatacgaaggataaggttggaagattttgttacagattcgtgtagactactttaggtagccaagcgtcatgtaacaattacgagtatgtgacatcagtaatgacatagttatagagaagaagaagatgaagatgaagatgaagaaaagtcatggctgcctaatttgaaaagaatcttcttatatatggcgttgctattgatattgatataaaggatttaatacgaggtatattgtaagtggaataaacgaatcaacctcaaaatgataaaatggccttgagagactttacaagaagcatctgtttttcaattctggattcgttcaacaactatcagtagcttgaaatagacggtaaaacttggagaatttgggcatgattggtgttaagaatatacaatatttagaaaaagggataaggtcaaataaacgtctgttctcaaacttgtaagatagcacaagtagtaacacatttagtaacttctcacattttaaattttattaatcgtgtagttgcatttaaagttcttataaaatatattaagtctacaatgtatgcgacagaaaatgcaataatggcttgctcatgcttcccaagctaaattcactagtattggctttaaatccttgctctatcaatttaatgcatttactgtgtaagccagtctgattacatcctatccatgtgaatattactgaaaattggagtcaattcaatcagaatcctagacacaggaacaacctacaatgaaaaaacagctagaaaaccaagcttctaccacttcaaaaaaaaacagtccaaatatcaagacttcacctttaaaatgcctccaatagcataaaaaataatagtctaatattggtaacaagctacattgttatgaaatcagccatcggatatatgtgcagcagcttgatcttatcacagaaggaaatcctcattcttatttttcatcattgatgcacccaaatcttttcctaggtgagtatatcaataaggtagcaaataccttttctctcaaaaaaggaattacagtgttttttataaattttttatttggtaatcattgcaaatggctttactatgttgtttacatttgtgtataatagagaatgttatcacaaacagagaatctctgctaaaataaagttgtcattgttgaagtatgctttttagtacaatgctgtagaaattaaccggagaagaatcttttccaggattgccaaggaagaaacccacctgcgatatacggcatatgaaggactgtaaggtaatcaatttgacacgaataacttagttaaaagttgatcaacaaaacataaatgacaagaaaaatagggaaacaacaaagcaatgagaagtaacgttattggtacagctcagactaatgatcataatttacaaaatttctaaattgatattatggttgtgaaatccagttattcctttctctttaaactttccgaataattaagggtttgaaacagaagttacatgagtgagaccaaccaatggtactttaattacactgctggagtggaattactaaagaaacgctagaattcaccatcatacacttgtcatagctcctcataaccaaaatgaaagaaactgtgaaccaaaaggaagaggatctatgaaaaatatctccttttcaacatcaaaatattctcaggttgacaatagatattcaaattagcttgggaatgcagggatttctgcaattcctaggtgttcaatgtacatccaaataatttataactacacacattcaagatactgaatttgatgttaaattactgagacatcaaaaagccccataaatcaggaatatttcagagacatacaataacattctcccagctgcatacttaattggttaaatagagtacatgatatgagaagaagaagtgaatgctatcataccacattctgggcaacggagatagtccttttccttttccctaagaacaagccctgaccctccacacacctcacatcttttttgagctatctgtaacattatccaacaatgaagacatgaaacacacgggcttcataacttatgagttagcagctcagccaaaagagtgacttacaattcttttgctaaattcaatccctgccaccacaaaaggggtaaccccagctgcaaaattcaaacacagaaaatcaaaacccaatttcggaacaccattctctttccataaagataagcacaaaatataactgcagtcttttggtgctgctctcaaatcagaattgaagtttcatctcgataacatgtttaatgcaaatctttattaagcagattattgataaaaaaaaatctctaatttgattaaagaataacaatatctaaaacacctaataaactgcatccaaagttttgtttgtcccataaaaacaaacatcacaagtaaagtaaaatatcaaaggttgtgctgtgtgacttgaggtacctatagctccaaccacaatttgccatgtgacttccactggagcagggtcaattactgtggtaacatcatcaacattcacaggcacagcagccacccttgttcttcttgcattcttaacataaacattattacaacgttgtctttgttgagtcacatgacagttctgtgagactttgctcctagttttcacactccctaacgaaagcagagacaaagaacaagatgctgcttccatggtacggtaactaactgaccaagctcgttcatttcacacttcacaacaacctaaccgttataaataatgccacgtgggcttttttagcccacgggctcgcgccaccgacgcgttacattgtgtgactcatgtttcagatatggttttaagtaaaaacgacaccgtttcagatagaaagaagataaacctctgggagtgcagagattctgattattagggttttggagtatattctttttctgtttctctctgcaacaatggcggctgttatgcctcactatccttataatccattgctatacttttcgactccttcgagtttttgttctcaattttggatttttgagagagagcgtttgggttctgcgaggttgaagaatttggtgaaacttgcagcacaaaccaatccgaggattctcaagagcaacaggaagtcaaagtatggagaggcactgtcgctgtacgatagcgacgaagacgatgaagagttggacgtcgacgacaacgacgacgacgatgatgattggctttctgatgtgagctttgtgatttcattgtgtgtggtcaaaagttttctttaaattctaggatgaatatctaattcaattgatgggtgaagtgggttttttaattatgcatttgaattgtttctttagtccaatgtaaaaaactgaggaatgtttaattatctgttgaaatttgatattgatgatgattgtttctttatttgttaattttccctttcattgtggaacatgtgtgcaggaggaattttctgagcctgctaacttagatgttaataacaacaagagatttaagtcaaagacaactaaaggtatgcttgaaaatgttatattgattattagttttaaggggggaagttgaatattcagactcttgtttgtgcaggaaaagatagacaacaggaacaggagtggggtttgagaccttttgacaatgaacaaagcattagattgcctagaagtgagagagtggcatccttacaaagaaatgagagtggaaaggtaccaaatcgtgatacagtaagctgtgaactgtcaaattgtgccttttaatgtacttgtggtgctcttgaaccttatgtttatttatctttcttttttcaagttgcagcatagtagaaatgtaaaggataaaaaatatccgcagttgtccgaggagattcctttggatgtgaaatggttaccacttcttgattacttaagcacttttggaatgaaggaatcacactttgtccaaatgtatgagagacgcatgcaatcacttcaaattaatgtgtgttccgcacaggaaaggttagaatacttattgagtattggtgttaaacaaagagatgtaagaagaatccttttgaggcagccacaaattcttgagtatacagtggagaacaatttgaagtctcgtgttgctttcttgaggggcctgggcatacctaattctagaatagggcaaattgttgctgctgctccatccttgttttcttatagtgttgagaattcgttaaaacctacggttagttatttaattgaggaagttggtatcaaggaaaaagatttgggtaaggtcattcagcttagtccccagattcttgtgcagagaattgacatttcatggaatactcgttgtatgtttcttaccaaagagttgggtgcacccagagatagcattgtgaagatggtgacaaaacatccccaacttctccattacagcatagatgatggattacttccaagaataaatttcctaaggagcataggaatgaaaaattcagacattgtgaaagttttgactagcctaacacaggtcattttgcatgtatttccctcattattaatttgtgaaaattatcctgttttactgttcctaatttcgattcctcctttccaatttatactgtttttgtaggatgccctacatttgcacaaatagaactaggaaaataatatattgttatatgacattgtcgtatatttttgtatattttggattcatacttataatgtgaggaacagtttgtatctcttgttaatgttgactaatgtgcctgcaggtgctatctctgtccttggaggagaatctaaagcccaaatatttgtacttggttaatgaacttaacaatgaggtgcaatccttgaccaaatacccgatgtatcttagcttatctttagaccagagaattcgtcctcgtcataggttcttggtttccctaaagaaagctccaaaaggaccatttccacttggatctctagttccaactgatgaatgcttttgccaacagtgggctggaactagtttggataaatatttggcatttcgtcagagattattacttaaaaagtttgctgagaaatatgaaagaaaaatgtgacagatcagaatcaagtttgtatctgtcaacttgcatgaatactggaagaagaatctgttgtaatattattgtcatgcaacatgttgctataaaattttcgtgatggtctgcattgtggctgaagctcaataattagagtttagttggctatttggcatactgtcatcacatgatttcatgacacactcaagtatcagtgtctgattctcagcagaagctgcccaattacttttgtgaagttttttattgctgtgcttgtggctgaaaagcagaacacatcatggtgcaatttgtcaccctaaggtgagctggtttgttagttaataattaatacattaagtatgctgttattaaccataagtctctaacatatcgcaggttgtggaccatattgcaaacttttattggtataaattgaagaaggtgtatcaattttaactctaagatccagcttatggattcattcatcgctactctcatgtttcctttttacctacaacaatgtgtttgtgtagatatatctttttactgttttcattcttttgtgtatcagatcagtagggcttctgttacctttgtcacttcaccagaccaatacataatttttttgtcaccccgcggccatttgtagcacatgtatgagttgaaataacattcatattatcttcagtactagtaattgaattctatcttctggatttatttatttttggggagggggagggggaggagggggttgcttggtttatgttgagttggtgtaatatatcactttcatctttcagtcgtgtattctcagaagattaactggatatggaagatactttttggatgattacagggaagaaatgacgagaaattattagcacatgcttggaaatggattaattttttgaaattacgatttcacaggaatagcagatgatgcaagagacgggttaaaattaaggttcattacattaaacattgttttcaatataggtacacgttcaaataaattgccatccaaatattaacaaattaaaaattgttttctggctcgtataacttttgtcatgttgcttacaatggaatggacgatgatgctctggcaagctttatttaatgattgtttcctcatcaatgacgaaaagtgattttggtttatttttttaccatcttccaaacttcatcttgcttgtggtataaagtttcgtttgtgaattgtgactaatattgttcgtatcgtatatgcacaatgaataatggtctctgtgtgagcttcatacttctcatattttgcctatcttcagagagaactttgggtgtcttttccatgcccactgcatgttttagacagctttagttctgtctgtgtgattgataggatgtatttgtatatatgttatacttgtatgttctcccttacatatatatatatatatatatatatannnnnnnnnnnnnnnnnnnnnnnnnnnnnnnnnnnnnnnnnnnnnnnnnnnnnnnnnnnnnnnnnnnnnnnnnnnnnnnnnnnnnnnnnnnnnnnnnnnnnnnnnnnnnnnnnnnnnnnnnnnnnnnnnnnnnnnnnnnnnnnnnnnnnnnnnnnnnnnnnnnnnnnnnnnnnnnnnnnnnnnnnnnnnnnnnnnnnnnnnnnnnnnnnnnnnnnnnnnnnnnnnnnnnnnnnnnnnnnnnnnnnnnnnnnnnnnnnnnnnnnnnnnnnnnnnnnnnnnnnnnnnnnnnnnnnnnnnnnnnnnnnnnnnnnnnnnnnnnnnnnnnnnnnnnnnnnnnnnnnnnnnnnnnnnnnnnnnnnnnnnnnnnnnnnnnnnnnnnnnnnnnnnnnnnnnnnnnnnnnnnnnnnnnnnnnnnnnnnnnnnnnnnnnnnnnnnnnnnnnnnnnnnnnnnnnnnnnnnnnnnnnnnnnnnnnnnnnnnnnnnnnnnnnnnnnnnnnnnnnnnnnnnnnnnnnnnnnnnnnnnnnnnnnnnnnnnnnnnnnnnnnnnnnnnnnnnnnnnnnnnnnnnnnnnnnnnnnnnnnnnnnnnnnnnnnnnnnnnnnnnnnnnnnnnnnnnnnnnnnnnnnnnnnnnnnnnnnnnnnnnnnnnnnnnnnnnnnnnnnnnnnnnnnnnnnnnnnnnnnnnnnnnnnnnnnnnnnnnnnnnnnnnnnnnnnnnnnnnnnnnnnnnnnnnnnnnnnnnnnnnnnnnnnnnnnnnnnnnnnnnnnnnnnnnnnnnnnnnnnnnnnnnnnnnnnnnnnnnnnnnnnnnnnnnnnnnnnnnnnnnnnnnnnnnnnnnnnnnnnnnnnnnnnnnnnnnnnnnnnnnnnnnnnnnnnnnnnnnnnnnnnnnnnnnnnntaaattagttcctcaaaacatagacacgcacggattctaagagctccttcaatctaattaaaactttggacaataatatacctagttattttcatccactaatgacgtcatgaataaaactcataactatatgatctaaaattcaaacgttttgccacctgtctgtaactaaaagctataaccttcttacatgtatcatttaacttttgttaatgccaccaattccaattgtgaagagaaaattcttccagtgtctcttcttcagcatgtacgcactagttggaattttgactaaaattactgcactaattgagaaatatttccatagaagaactatattgtgtatcaaaagaaagctgcgaccattggcctgattctgtttggactctatatttcttgtatatgtatctgaaactatgactgtttacctcccactatctagtgaaaatgcgaatggactgtccgggagattgagtccttgattgctggataaaaattaaaaagtaaataaataacattatccatagttaacaaaatatttcaggaaaagtatagcagcaaaactgcatgtttgcaaacaaataatatcatccacacagaaattgtaaacaagcagaggtaacttttactatgtctcatatttgctacttgacaaaacgaatggtgttctactacagccaagatcatgaaagaaaacttttagtgttttacaaatctcttttagtgttttacaaatcatgaaaggaactattgtttttggggtttaccggtttggctatggtatagagatatatcagaatggtcacaatcaaatccttctatcatttctatttacataaaaccctcaaaaagttatttacaactcaaataactagaaatttaaaatgaatgagatagaaaatgacttcaaaggtttacaatacaaaatttgataaaatgtgtaacattttatagtgtacaatgttgaggtttcaaagacaaaaatttgggatcaaaagatgatttaaaataatctctcaattgcttggttttgaacaaaagatgatttaaaatggtttaatggatctggttcataaagattttcaaacaaaagttgagaatttgagagttttagataaaaaagaaaacttataggaaaggacttgattataataacaaaaaactgaaggactaaattcaataaaaaaattattaggggaacaaaatcccagcgaccatagtagagaaacaaaaagtacaattaagcctaatgtatacaaaacaggtaggaagtagaatgtgagagggagagaagtctattggaaattgatgcatacctgtcctcatcagagtaattggagtctgtatgcctggatttggcatgcagtggaaaactgaaagattcttctgctggctggaaattgaagtgatctgcatgagaaattatttcaatcaatataactcagaatgatagttagaacatacagaaatttgataaatagaaatgtaaacctatattatcacacaccatctgaaatccttgactcatccatggagaagccaaaatgaggtgaactggagaaagatttttgggcaaaaggcagctgttcaagacttctcctctgaagttccaggacttgctcctgctcttcctcttcaattagttgtggctgtctcctattggatctatggttcccaaaacttcttggaactaaatagattataattatgcattagattgtacaaaggcttctcccacaaaagggaaaagaaagaaagcagatcattaaataacttggatgagaaaaccaatcattgggaagttaattgttaaccataagaaataagaaataatttgggttataaactagataatgtcatacttgagttaagttcagtgtcgacatctacatagcgtggtgaataacaaacagggtgctcaattctatctatgtacttcctgcatccaaattgaaatgcacactgaaattattatggggaaaagaagccattaacaatgcccaagagaattttaccaaaaggtatataagcagaagcacgtaagatttctttagatgtaaataccaattcaatatactacatttgtccatcttactttgcatttaaagaatagagagagacatagcagactagttttcacacttcaaacaatgcacttgctattcagtcacaggattgatttacttggttgtgtatgttgacaacaacattattgtattgtacatgtaaagcaacatctctttctagattttggacaatatcttggcaaggttcaatatttcttgggaatagaggtggcacaatccaagaatggtattgtcatttcccaaagaaagaatgcaatggatatcttagaggagacaagttgatggatgctaaacctgtagacactcctatggatcctaatgccaaacttataccatttagggtgagccattggttagaagactgaactaactcactattactcatccagatatctcttttatagtcaatgtggtaagtcaaatacttaatcctccctgtgaaggacactggatgcagcaatttgcatcctacaatatattgaagaagctctaagaaaagttctcctgtaagacgacaaaagacagactagagttgtgggatattcaattgcagattgagcaggctctccctactgacagggtatcacttctggtgcattcttattggtgataccatgatttcttggaaaaataagagtgttgttgcaagatccaatgcataagcaaaatgttaagccatggccctagccacttgtgaactaatgtgactaaaatagatgctcaaagaattcaggtttggggaagttgcacaaatgacacatgtatgtgacaatcaggcagctccatattgcctaagatccaatatttcatgaggaccaaacacaattagttatatgtgataaacttggtggagttggtgcctatgatttataaactatagcttgatggacagtatgagagactatgtaaatatgttagaaattatgcaaatattgtaattagggaactgtgtgtatttatgtaaattagggtaaccattatttattgtatttatgactcattataaataaaagattgtgtaaattagacacatggatttcaccctatgtctcttgccctctttttttcaataaatggaaaggggagaacaaagaggaagaactagaacaagggaatcaagtaatcaacagcaaggaataaattttcatcaaattatgctaactctagcaatattgatgacaaatatgtagtcatttcaaactaaaaaatataagcttttattttacaatattaacttaaaataactacatttacaggaataaatgagaatttcaaaccataaaactacaagaacttccaatataaaaaaattgaaaggaaaagacagggaattcacctttcattaacctttgccttctcctggtaagccttcacaagcacccgagaatccccaacacaatggggattccccttatcaaaaacagttttgacagtttctgaatgaacaaatgtcacaaatccaaacatccttctctgctggtttggaattctgacatctgcaacaggtccaaatgtgctacaaatgaaatatataaaagtcagttcattaatgcaaataattaactgcaaagaaatgggaacatgcactttaacaacaaaagatgtaatatacttgaagtagtttgagacatcatcctctgtgaaagtgctgtcaggtgggaacgtcatatatatttgccgtgaagcactgatatttcgagcaaaatctcccttttgcatttgtgtgggagcatcttctgccagaaccactgaatgctgtccgtgaggtctgtaaattaaccacaagaaaagccaaattagagtaagaaacatcaaacactaaataaataataaatgcaaaaaaaaaaaatcataaacctttacctgcttattagcctaatattattgttcagtcgtgcaagaagctttgtcaaactatagccagacttaccatgcctctggttctcgcttaaataaccatctgcttgcagtacctttttatatttatcgtagtatgccattggcagggaagcaattgacataggaccgccttttgttcttaggagctcaataatttcagactctaactgtgacagtgaccccggggaaatcacctgatcctcactaatatcatcatttccatacatctgagagaatttctcagggacaacttgcccatgatagaatctgcagcaagttccatgcttacagaatcctttgttgaaatagtgacatatcttcattggttcagaaaaccttctcccagcttttccacccaaattggcagcagaagcatctaagccatagtaatcattggcaatccctccagtcccagtttttacagcatctatttgattctccaaagtgagcatctgtgtctgcttctgaagttctacaatagaatccaagtaattccttcccataaagtttggattgacgttgccagcagattgtggatcccaatcgagaggaggcacctgaaagtttggtgaagtaggagttctaggggagattactgataaatcacttaaaccttgctgagggtttacagtacgtgacattgcgagcatatctggtttagcatccaacctttggagttcctttctggcctgaactgccacttcacggatgaaatagtcagagtatgaagccaatttagccatttcttgttctccatggccttgaaagaagatataatcaattatctttctagcattctctggctcaaacttctgaattttatcaaagactatacttgtgtagggagaatccataactcttgttactgcaaaaagtccagcccgcgtaaacaaaatttagtgaatactgctcacaaaacaagcacaaagaaacacaacaaaaccacatcacaaagattcagcacaagacatatagggtacaaaaaaaccagagtcccaatcttacaaaacaaaattgaaaacctaatataccataacaattgactaaacaaccaaaaccaaaaaaaagtgtacaaattctgaggaagagattccacaaatccaacagaaaaaaaaaaaaaaaggtgatgttctcttgcaaaaaggcgccctattccaagaatcaaatattattaaaaaacctagcaagacaggaacagtgattaagtcttagaataggaaaacactccacagtgcattatattttcctcaattttctctgtcatcacccaaaaaggaagtaacttcaatgcagcccagaaatgggtcttgctcctaatatggaaacgactaacgagcacgaaacacgctcagaaatatccacatgcattaaccacacataccattagaaagtcgcaacagaacaaatggttacaagaaaacgaatcagcatttgcaaattaaaaaccgggcactgacatttcaacattggtgactaaaggtccaatttttttgcaaaacaaagaaaagttggtataatctcaaacgactgcgtaaatcccaaagaataaaaaaagaacaaataaataaaaacaaaatcttcaaaagctgcatacccatcaaagatcaggagataaacagtgctgcaaatgtttctaagaacgaacctttttcaattttctttccgcaccaaactttttctaaccccaaagaattaaaaaagaacaaataaataaaaacaaaattatagaaaatattagacttttagtttgatagttgatattagataaaatatatagtatttcataagatagatcttttaacttattttgaataggtattattatataagatatattgttttgaataattatctataataattaataaaatatacatcttatcttatttttaaatacttattctatatagcagtcatcttgttatcagttaataaaatcttcaaaaggtgcatatccatcaaagagaaggagataaacagtgctgcaaatctttccaagagtcaaactttttccaactccagataataaaaaaaaacaaaaaaaacaaaatcttcaaaagctatatacccatcgaataacaggatatacacaatgctgcaaatgtttcaagaatgaaacttgtttcaacttattccacatcaaactttttctcccagtacaataacccttcaagtacattcagagagttgtgacatcctaatccaaaaataaacatagagctgtaacatcctaatccaaaaataaactgagtgatacttttgaaaagactcagaatccagatagtagcaaagacaccatttatggttctctcttcttttttgcaaaatcaaatatagtttttttttgctaagcacactttatagtttatatagtaacctctacacactttatattaaagtagtgactctgcagtttttatttcctttaaaatttaaaactttctacaaaatcacggatgttgaatagtctgatacttaggcaaaatattttgcttaatatttgaggactaaaactgcttggaactaccccaattactataataggctttttcatcatatggggacttttttttttcttaattaagggtgaattttaaaaaaattattaaataggataaatcgtactaagacttgtttgaatacaagtcagaagtacttttcagagcttttctattgaaaatataatattttttttnnnnnnnnnnnnnnnnnnnnnnnnnnnnnnnnnnnnnnnnnnnnnnnnnnnnnnnnnnnnnnnnnnnnnnnnnnnnnnnnnnnnnnnnnnnnnnnnnnnnnnnnnnnnnnnnnnnnnnnnnnnnnnnnnnnnnnnnnnnnnnnnnnnnnnnnnnnnnnnnnnnnnnnnnnnnnnnnnnnnnnnnnnnnnnnnnnnnnnnnnnnnnnnnnnnnnnnnnnnnncacaaaataaaaataataatttggaaaattcaatgtgctgaatttagtacttcaactcttcaactgcacaacaaggtcggcaatttttgtcatgagtgtatctaagttttaagtcacataaggtgggttttttttttttcccctctacagttagagtttagttttctttgatattcaatttaatgatcattaaattgaaaaaaaatcattaaggaattaaataatagataaagatatggacccaagttgaatgtgtgccattggataagatccttgagattcagaaactcaaatcttgtaaagcggggaccaagggagaaaaaatactggccttggaaagaggctaaggaaggattaaagggttggttgtggtgaaagaatggaacaaacattttacatttcaatttgtttgtgagggaacacaacacaaacatagataggacaatgccacatcttctttaaatataaaaaaagtccataaataaatcaatgtcacaccatgtatgcacacagcacactcattgaattgtgttctttgtcatgctaaacggaggcccctcgaatttctgggagggcccacaacatccccaagagttttattttatgatcttgttcatgcagatttggcacttcatttttatattcgttatatacttagttagaccctacctcagggaggggtatcaaatgaaaggcaacaattccataatcttatcctttctcaaagcttgatttgtggccaatgctcgatcgaagtggtttttgttaggattaattgtgattttagttctcccattttttagtttatgtatctatgattttagttttttaattttaatttttatagttttctaattgtttgaataggtttattattctaaattttcatttaatatttcctacaaatgtgatatgagtgtgatctattgttgatttgtacaagaaaaatatataaaataattaagtgaaaataaataaataaataaatagtttgtgtacaatttatttgttatttaaaaatttaatattttttattttatataaatcaattatacgtcatacctttgaattgatacatttatgtaaattaatagatataaatttgaggtaaagacacttaatttcaataattaaaaaactgaaagtgaataattaaaactaaagaaatcaaaatcccgtatccctaaaatatttgaccaaaagtataattaggttatttaggtcctattaagatgatttttagttttgagtttcaacttttttaaaaaaattacagtcaatttttagttttatttttaaaaaaaattaaatcagttcttaaaatataagtttcaaataatttcatttaaaatatttcatatcatattaaaattaatttaagaatgtttttgtatggtggtgacgacaatggtgatgtcgatgacgataacgataccaagtcatagtaataataacaatagtggtgacgatggtggtgatggtggtagaggtggtagaggtgacattggtggtggtggcagattggcaatgacaacatggtggtgatagtagtattgtttgtgacaacaacaataacgaaaatggtattagtggtagtggcagcgaagtggtagtagaaatgtcagtggtgtcgatgatgataacgatgttggtggtgacaatgagtggtggcgatgtggtggtggtggtggtggttgcagcgacgttgatgatggggtggcgaccgtgcaatgatgaaggtgttattgttggtggtgatggtggtagtggcgatgacatatgtggtggcggcaatgacggtggtgggatagtgtggtgttgaattgtgaaatttaaattagcaacaagtggtgatgatggtagtggttgcgacaacattggtggtgagggtggtgacggtacgatgacgaatatggtagtggtgacaatgatggtagttgtgatggtgacattggtagtgatggtgacgataatgatgtcggtgacgacgatggtgacaatgacaatggtggtggtgataataatgttagtgatcgtggtggtgacagttagttatagtagtgacaacaatgacgataatggtggcgatgacgatgacgataataatgacaatgataatagtgatattgacaacaagtgtcatttacaaatgtgaaaaaaaatgtgtgttttgtttttaaattaaaaatcaaattcactaaaagtttttcttagtttaaaaaaatgtgaaaaaatatatataaaatgtattgaaaatcattaccactccaaagagacgcttaatttttatatagagatcaaatgttttactagtcaaatataatcgcgagtttgttctacaaagtcgcctgaatattcttttcaattataacaagtttattttgtttagcttgatatatagtgcgttagctttgataatattctgtacaatgttgttatccatttagctttctttatgggatgacataactttttctagatttaatggaagaaattgaacttatcgatgataatccaacataatatttgctcagtgggaatataatgggtcagagggatttataattgcggtggattggagagtgcttcaacaattgagtgatggaggagttcaataattgtttagggagaaatgagtggtgacttgcaaatattaagacactctagtaagctatatgtttaatgtgggtgtgtagaagcttaataagggagagatctaatgatgttatagtctaaatgtgacgaaatatatagaatggagagagaacaaagagtggcttaattagcaatttaattgggaaatattttaattttccgggtgagttgtatcttcaaaacacaatttgtataattagagttgtgcaattataatatcccataatataaatttgtcaaaattatatgaaagtcttgccatcttaattgctttaagtatttttttactattttcattagaaagataaaggtagtagcagtagttgttactatctctgtaaagttgccatcactgtatccttaatgtctacttttatttgaacgagtctttagtgatttcttcgaagaccaaaaaggaaaaaagaacaatactactactacttaaacagcactactacttcataaatgtggttgcaaacaagatgagagacattaacggtacatacatattaatggttccgttacgtcacaacctttccctgccccaatgtttcaaacacacccactcttcatacacaagctacgtatacctatggccaaccttgtctagttgactccaatattttggaaaagtggtccaaaaacacgtgctgccagtgatgtataatgtgcgtgtagtgaacatttttaggattcaaaaaatgcataaatgttcatactgatccaatcaagtttgtaggttcgtaaggaattttattcaaagaatttcgtgtattgtactttggtttttgatcacatggtcctttttccagcgttgtcgttgtcatatttttcactaccatgatagcaccgaataagtgaccaagtatgtcaacttaaaagagggaattatgaatgaaagaaattaaaatgcatgccaataaagggagagtgactctctggaatgaatcttcttgtcatgatgtgtatatatgtcactaaggttacagctgaattgcacccatttttctggaataaatcccaagatccgcaaatggagcagttcattaggatgcaaattaattgtagctagactagaaaaccacgacacctaattgtgtgtttgggtttctcttttcttggattacagcttatcttgcaaaattaagcccaaaactgattaaaaccacgggagaggattaaaaaaaatctctatcacattcattttatatttcttgaataatatgttattagtgtgaagtatttatcaaatttaatggtgattaatttacgtcaaaaatctgactgatcatttttagtgagatttttcttctcaattacaatttttttttcatctgcagacttaaactgataccttagattgaatctagaatcaatcggacaatgactttttggtacattcattttatattatttgatttctctaagttttttctctttagtatttcattttttttaggatggtgtggactatagatgagaatattttaggaccactttgggctgcataaaaagcaggttagtctttctgttcaaagttcaaacccaatctcaaagtgggttgtaggtcacgccctgctagccaggcattcaacacgtacgcgagctacgttaattttaacgcaggacgaagattacgtgacctaagacatattttaaaatcattaaaatatccaaaatttaaatcatgtgttaaaaatatataaaaaaataatgcctaaaactaaaaaataaaaaattaagtcacgagagggtttttaatctaaagtaaattcaataaaatttaagcttcttgtattgcctatttagcatgcatgctaggatagtaacatgttgcatatgtagaatatagatatgtaaacactcactcactgtaaatatttgattgaaactctttatttctctttatctttttttcttgtcgcgtaacatctcatatcatatctatacttttctttctttaggtgtatccgtatagattgacagtacatgagtgatgagtgtctatggatatttttggtacatgaacatctatctatatatttgggtcttgttttgttcacctaattaatattgtgtgaaacaaaaggcataccaataaattaaacatgagtaatataagttgatttgtctctatggtagtctgcagactcatcctgagaattttagaggttagttatactgagtttttattatataaacaaaagaaatattgaaaaatgaattctaatgcatagtatatatctccttgttagaatgaaaagttagacatataattcctgtgaagttgtgactgcctgttttaatagatttctgacctaaaacgaagtgtaaaggctgaagagggagcataacatgtaagattaacaacacgtgcaagaaagggatcgaagaagagaaccgttgccacataaggttgcgcccctgtggtgtgaacagataaaatattagtttcagaagccaacaacacccatattctttctatttatatttaaatgttaattcgtcattaaggaataaggatacatctatatttacttataataatcaatataattattgacatttgacgctcaaatttttattttacagtacttattaataagttttttttttnnnnnnnnnnnnnnnnnnnnnnnnnnnnnnnnnnnnnnnnnnnnnnnnnnnnnnnnnnnnnnnnnnnnnnnnnnnnnnnnnnnnnnnnnnnnnnnnnnnnnnnnnnnnnnnnnnnnnnnnnnnnnnnnnnnnnnnnnnnnnnnnnnnnnnnnnnnnnnnnnnnnnnnnnnnnnnnnnnnnnnnnnnnnnnnnnnnnnnnnnnnnnnnnnnnnnnnnnnnnnnnnnnnnnnnnnnnnnnnnnnnnnnnnnnnnnnnnnnnnnnnnnnnnnnnnnnnnnnnnnnnnnnnnnnnnnnnnnnnnnnnnnnnnnnnnnnnnnnnnnnnnnnnnnnnnnnnnnnnnnnnnnnnnnnnnnnnnnnnnnnnnnnnnnnnnnnnnnnnnnnnnnnnnnnnnnnnnnnnnnnnnnnnnnnnnnnnnnnnnnnnnnnnnnnnnnnnnnnnnnnnnnnnnnnnnnnnnnnnnnnnnnnnnnnnnnnnnnnnnnnnnnnnnnnnnnnnnnnnnnnnnnnnnnnnnnnnnnnnnnnnnnnnnnnnnnnnnnnnnnnnnnnnnnnnnnnnnnnnnnnnnnnnnnnnnnnnnnnnnnnnnnnnnnnnnnnnnnnnnnnnnnnnnnnnnnnnnnnnnnnnnnnnnnnnnnnnnnnnnnnnnnnnnnnnnnnnnnnnnnnnnnnnnnnnnnnnnnnnnnnnnnnnnnnnnnnnnnnnnnnnnnnnnnnnnnnnnnnnnnnnnnnnnnnnnnnnnnnnnnnnnnnnnnnnnnnnnnnnnnnnnnnnnnnnnnnnnnnnnnnnnnnnnnnnnnnnnnnnnnnnnnnnnnnnnnnnnnnnnnnnnnnnnnnnnnnnnnnnnnnnnnnnnnnnnnnnnnnnnnnnnnnnnnnnnnnnnnnnnnnnnnnnnnnnnnnnnnnnnnnnnnnnnnnnnnnnnnnnnnnnnnnnnnnnnnnnnnnnnnnnnnnnnnnnnnnnnnnnnnnnnnnnnnnnnnnnnnnnnnnnnnnnnnnnnnnnnnnnnnnnnnnnnnnnnnnnnnnnnnnnnnnnnnnnnnnnnnnnnnnnnnnnnnnnnnnnnnnnnnnnnnnnnnnnnnnnnnnnnnnnnnnnnnnnnnnnnnnnnnnnnnnnnnnnnnnnnnnnnnnnnnnnnnnnnnnnnnnnnnnnnnnnnnnnnnnnnnnnnnnnnnnnnnnnnnnnnnnnnnnnnnnnnnnnnnnnnnnnnnnnnnnnnnnnnnnnnnnnnnnnnnnnnnnnnnnnnnnnnnnnnnnnnnnnnnnnnnnnnnnnnnnnnnnnnnnnnnnnnnnnnnnnnnnnnnnnnnnnnnnnnnnnnnnnnnnnnnnnnnnnnnnnnnnnnnnnnnnnnnnnnnnnnnnnnnnnnnnnnnnnnnnnnnnnnnnnnnnnnnnnnnnnnnnnnnnnnnnnnnnnnnnnnnnnnnnnnnnnnnnnnnnnnnnnnnnnnnnnnnnnnnnnnnaaaaaagagaataacgttatcagaatgtattcttgggtcgtgagtggcaacagataaatgtactgctgaaaattacaaaagaaaaagaaaaaaaaattacatcttaatttgttcatggcaattaaaagatttttataatttataaatattcatatttcacggaaagaaagcatttttttttaaataaaataaaattatgcatctccatccacgtgattcaataatgacttttaacataatcaggttgacttatttttggtttgataatgcggtatggcaaccacgttgaatccataagatcgcgccaatgtagcaagtatgtgtgtgtgatggtggatcatcgtacttctaattaagaagaatctgaacttaattaagctctttcactaatttgaggagaatatgactatgagggtaaacaatttgcttaactcattgaatttcagtttttttttttatttctctgggtcaagaaagtttcaagttgacttatctacaattccagaacaacgttctgttttgatgattctatataagtttcagctaattcttgatatacatgtacacataaggttgttaattatgaaatgttctacttattattatggtgctgcaaaagatcgtaattgaggtaccgtaccattccactgtgagaagtgaaacaaaaagattatgaccatatgcacgatggcagatggtatgtttatcgaaaatcatttttattttatttcagtgacaaattaaattaaatatggtctaaattatcagtattaactatttgtgcatcacatgcatggcttaattaattctttttggatcatatatatgatgtttatatatataggtgttagtaaggttactttttcaaaggggaagacaaagataaagtagttattgaagaaggaggagatgcagctgtggtggcagcatgtttgaggaagaaggtgaacaagtgtgctaagctagttagtgtggccaaggatgcatgaagattgaagagagttcacaacttcatcggctagccatgcatgcatgttattggttatgattccgtctttcaattcgtattcttgtgaacttagaatctgaatttgtatcgtcatctagttatagtgtgttatatatatgttatttctaatattcatatgtggggttagaaagtgatttatttgataatattttcctaaattaattattaaataaaattgtatccatggatggttgattttgtagaaatttgatgtaccccatgagagtaagtagcatttttttatgatctgcgttgtttaacttgtataacaatatgttaatttgaatcttttagaaaatatgaatttcctgatgtagaatctcgatccgttgcacaatctttttaaactaaactgtcaaattttaattagtctatatcacgatctatatattatcccattattaatattgttttattgttcaaattgttcatgatgatggaaatatatgggataattcatttgaatttatataaaaaaaatatatttgtgatctctgtataatatatttataatttattttaacatattatatgtaaacttcatcaaatttacatattatatgtaactaattttagtatatttcaaaattaaattttaaagttttcatttgataagaatttattaaacatgtgttttaatgaaactgtttacatggtccgactcaagtgaacgcacttccttaagtgagacataataataattaataataatcatttttaattaaattttatgtaaccacgagacataataataattaataataatcatttttaattaaattttatgtaaccatcatatctttaaaagattcataaaataaaaatcaaatatgtaaaaattaaatctcaattatcacatctaaaaatatcacaattggtagtagtaatggtggtaaaaatcatggtaatgatagaaataggttgacatagtaattgagatatttttggatataataaatcttgatctgattattatcggattctcaaaaactttattgatcatatcttaatttcttctatgaggacttgctatcaatattgtttctttttttaaaaagcctaaacgtgtatatgttgaatgaattgatagcttatgccgtggagggttaagttcaattccctcagttgtagtttcttctgttttcctttctcttttcttttctccacttaccaagaacaatgatttttatagctcgagcatcattaccaagggaattaaattatgtcttcttcgaatttaatttaaaaacgcacacatttaaaggtaaataaaaattagagaagtaaaattcactatgcttgtacacatttatacattttgaggaaaacattgaaacaacaatcatggtacatgtctacaaattcaaacactaagaacctttcatactgcctaaatttgcttttaaaggtgtcaaacgaaattttgtggaaaaaaacatgtttggttgttgtttcctggctcgatctgtttgccccctaaaggtacatttgactacgttatgttaagaattttatattaagttccgtttcaaatttacttttaaaataaaaatattcaaacaaataacatcataatgaaaaaacaatgctattttataatatatttttatacaaaaatgtgttccttgaatattttataaataaagaattacaagcgggagttaagagtgaaataggattacttcaaaaaaataaatgagtaaaataggattgaataaagtacaattttgaagttcattaattgataaggattaaaatttggtgtagagataaaaacatctatttccaactggataatctggtgacagattctttcccagtgataggaagtgaaagttgtttctaattaattccattaaatttgtgaagaaacacaagtaaatttctgtgtttcagcagtgctaagctagtgtgtgtgtgtatgagagggggttggaaaaaatggtcattgttttgatcaaacctgaaaaacctgacatctttattacaccaaagccttaaagactttcgttagcaaagactcctctaattcgtcttttgcaaggttttacatgcttgaactcattgcttctcattttgtacatgtatcataatttttccatcttataggctgttgcaaaaatggcacaaaagcatgccaggtataaagaaaggagaaaaatatgaagaacgaacaaacttaacctctgttagaattttcctgatcaactaaatattcactaggaatgtcatcctgtggtctctttgcaaatgtatctccgtcatattctgcatcattgtccgagttctcatcactgctccattttcttttcatgattttggggaccatgcgagttactttagtctccaacatttcatcattattatttacgcgttcaaaccgaacagcgctcacttttctggcatttccagctagtatctgcaccaaagacaaagaagctgcgtgttttctattccaaagacaaaggggatgggggaggctaaggagaagttctagattcagtttattacttcatacagattgccaaaaataaaaacattttaatttgaaaccctataaatgtggctcacacaagttaaaaaataaaggattatgcaaaatataattccaatctcgtgacaacatagaaccctacaaaatggaaaagctgtagaattgatagggtacaatataccgagtcctctgacattgcttcactaaccatatgttcaaaaaccagaaatcaaagcacaaacttgttgaacaagctttttgagggaaatcacattgacatctttagtgtagcttgagtaaccgtagagtaataaaactaaaaagtggtacatgcaacttatgcaagtatgctgtagttgtgttatgctatcattatacttgctgatgtaatttatgtgcaaagtgctaaccatccattctcttcaactttggactgtatatgcaaaatcaataggactaccttgagtggcaatttaagatagcaacagattgattacctcaagtttgaaaatctggttcttctccttctgatcctgctggtcagcattggactcattgttatcatcttcatcttccctttcaagaactactttgatgcactcacctgtccttggaatgtatccaaatgcttcacacacaaagcctgataccgtctcatattggtgaccctgaaatagaagatgtcatctacgtataaggaggcctgaaattcttcatcagtcttagcaatatgaattgtaagcaaaattaattccaatgagatcattgtttgtctcttatattcttagaatatgagtttgggtctaactcaacctcaagctaacttaaggggtgagggttgtccctcacttatatactctatcttggctttatctttagttgaatatgctctgataccaccttagattctttgaatgtgagtttgggcctaactcaaccccaaaagctagctcaaggggtgagggttgcccttcactaatatactctatcttggctttatctttagtcgatgtgggacttggattttttccaatgctgtcaactcaaatctaaaccccaggattcatgaaacccaattgttatcagcataaatttctccaaaaatataatgcagttgcacaatttcccaatttagtccacaacttgtgtagaaataacaagcaagcataagaaatgtgttggcatgatgcctatttgaaatccaatggagcggatgcctatttgagatgcaaagatgggtctacaacgactctgaagggtaaattcatgaacaacttaattattgctatactactaattgtgatcttggatttttttcccttttaaggataaactgactagatagtgcaatttagaaagtcacactagctccagtcaaataagcagggtcatgagaagacaaatatgtcaattgcatgtaaaaaaagggctaaacctctggcatcttgatgttcaaatcttcagagagctgatcaatggaagtgtttgcatccacatcaaaaacaccctcagctcgcattactatgtagccagtttttttctgtatctcctcctgtaggaatcaccaggacagaatgtaaaaacgttctttaatgaaaaattagcaaacaaatagatagtcatcaacaatcaaatgcataattaggcgataatagctaaattcaaagtgcattaatgtcctactgctgttagagacaatgacttgaacagttaaacattaagagtaatgtacactaaacttaaaggaatgatagaattgaacaaaatgtataattttgttttttcttcctggcagaacttgcactctgcctactgagggcatcctgacacgaataatatactaaatgaaattatttaacacaatcaaatctagagtgaccacttacaactcccaaaacagatgtttttgctgcattttgtttatcaaaaaggttattattcagcatacaaatcattttctatcttcagtctgagttagtttatcagttacccagaaattatgtgtagaattactagcaacctcagaatcaaacctagcttaaattgtatactgatctctgttttgctaacaaagttgaattctatcttgacatcttcccagaacccttcttgcacttacatgcattattatcacgtttacacatcattactggttaccctctcatttactttaatttcgtgctcacaaatttacactatgatgcttcggagagtttgtatttgaacattgaatatggccaagaacaatttatttacttttatttatttttaccaaacaagacttcctagttatgaaataacatcataaacccatcattcctcaaataaacacggatccatctcaatagtttgacctctttctttacttctggaaattctgttaatttatataaagttcgttcatgttgtattacttgaaaaaacgtgaaattttttaactgctttgaattatagcaatctgaagccatgaaaatagatagccaaaaacacaagctggacttttagcaaagcaccactagtaaccattaaacagtagatttgtcagcatctaaattcttgatagttataagacaataaaaataactgagaaaggtatacaaggattatgcagtcagcacaaacaaatattccatacaaaactgttgttgaacaaagagtgcagaataaaaaggatcctttgtttctttttttttggtgaaacagagtaaagatgaaggaattcaatatatgcttcactttcagttatttaaaaatatatttaaaagaaacaaagtaaagattaagcacaagcattacctttgagtcattttcatcaaagatttcaccaacaatttcctcaacaacatcttcgagagttacaatctgttagatggaaatatcaataagacatctatatttgataaactgaaaattgttagaacttataagcagattacatggaatggatttcagaagacttggagagtctagttacaatctaataaactgttcgaagagctaaacctctctctcgatttagctatcaataaaagcgatttatgtctacacccagtctttgctaaatgcaacaggtgtgtggaagggtggaccataaagaatcgaagaaacactgctattagatattcaaacttaattgtaacaagaacaaggaaagataaaggcaagtggaagatgagaatagtgggtaaataagaacatttagtaaatcagaatagcctgccttgtaaccagaaagacttttggttttattacaatgattttggatctgtaaagtaagagaaaaaataattaagttatattagagcacaagacacagcgtatggtacaacatattacaagagtacagctgtagcacagttagacatgtataaaaactaatatttctacaggattatttatgaatattcttgcaatagttcatgatgacgggaatgatctccatgttgattctgtttgcttttatttcaaattagcataaaaaagaggttgataaataattggaaaagattttgaaagaaactaaacgaataggaatagcatgttcaaattgatatctttcatatacttctttttgggtcaatggttgtaattagcagtgtatatatcaccagtgaatcctaaatttacagatatatattcacatttatgtcagacaaaaagatccgagttggttgtattctggactggtgtgcacatacccccacagttccaccatactcattaagaacaaccgccatgtgaaccttcctgattctgaactctctaagaagattccaaacagacattgaatctgcaaatcgtaataataatttattaacattctgcaccaagttaaaagatatagatgtattcctatcccagacaaatcaaccagtttaacaattcaatttcaataggaggagaaaatcagggattgtgatcattaagttcagtcaagacatagcaagtcagctgctgcttaattctttgtccatacattaaggaataattcatcataaaatactagcacatgacagaaagccaaattgttgaacattcccctgctacccttccaattggtgtgtttgtattataagtttatgacagggaattaaagatattgcgaaatttatcaatgaaaaaaagatatcttgatgaagcaaagatagcatattagcatgtttaaattttaaaagaaatgctgaattggtcagaatgacaattcagagcctccagaatctattctgaaaatgcactgaaatatatggagcaacacaatcaacacagcagagatgacaatgcaatgggtgaataaaacacttgcatagctggcccaattatagtcagcaggtaaaataaatatttagggctggcatgtttcattgtcgtgacgaggaaattgcgtatagaaagagaatgttttatatgtactgtggctacattatattgcatgaatacggttgaacatagttaatctcaagatgaatgatgaaaaaagttaccaggtacaaaataagcaggcttgtgagccatatctccaactgtagtactttctagcaactcacccttcaaaatcaaacagattataattctacagactatgagattgggggatataattaataagtaacgcacctgtaactcaataaacatgatgagtaaaatctcctaaccttttgaacataatccagcagatccattgcatatgcaatacccattatattatcaacacgttgctcaaaaacaggtactctaggaaacacgtcaagatctagttagcacattggaaaagtaaaatcactgtaaatttgaaatcaggaaatcttcaaataccttgagtactgatgtgtgacccacaagtgatgaaagtctaccaggcttgaacttgcatcaattgcaacaacatcaacaagaggtgtcataacctctctgacatgtgtgtcttttatctctaacacattttcaatcatatcctgtagtatattatatatatgtgagatgcttaaattttaacagacaaataaaaatggattaaaacatctataacaatcaatgaagataaggcttttgcaagtgttataaagaagcatgacaatagagtaacatacatcattattagaaaatatgatgggggctcatttccatacgaaaaattgaaaatttatttatgctaatttattgattccttttcactactggaatccgagatgaaaatatttacatacaatattttttagaacaaacctcttgatgcttagaatttagaatcaaacgcaagtctcaagtctcctttcccctagcttgcttgtattggaaaaaaagtttttttttttttnnnnnnnnnnnnnnnnnnnnnnnnnnnnnnnnnnnnnnnnnnnnnnnnnnnnnnnnnnnnnnnnnnnnnnnnnnnnnnnnnnnnnnnnnnnnnnnnnnnnnnnnnnnnnnnnnnnnnnnnnnnnnnnnnnnnnnnnnnnnnnnnnnnnnnnnnnnnnnnnnnnnnnnnnnnnnnnnnnnnnnnnnnnnnnnnnnnnnnnnnnnnnnnnnnnnnnnnnnnnnnnnnnnnnnnnnnnnnnnnnnnnnnnnnnnnnnnnnnnnnnnnnnnnnnnnnnnnnnnnnnnnnnnnnnnnnnnnnnnnnnnnnnnnnnnnnnnnnnnnnnnnnnnnnnnnnnnnnnnnnnnnnnnnnnnnnnnnnnnnnnnnnnnnnnnnnnnnnnnnnnnnnnnnnnnnnnnnnnnnnnnnnnnnnnnnnnnnnnnnnnnnnnnnnnnnnnnnnnnnnnnnnnnnnnnnnnnnnnnnnnnnnnnnnnnnnnnnnnnnnnnnnnnnnnnnnnnnnnnnnnnnnnnnnnnnnnnnnnnnnnnnnnnnnnnnnnnnnnnnnnnnnnnnnnnnnnnnnnnnnnnnnnnnnnnnnnnnnnnnnnnnnnnnnnnnnnnnnnnatacaatatttcatttcaaatgttatcaaaataaactaaattactacttattacctattatctttttccttacaacataaaaactcaaattgaattgtcgtaattttcgaagaaaacatcaatcaatgtttaattcgaatctcaattcaaaaatggatttcgaattattaatttctatattttttccttaaaagagtagttctagcggttttttcaaatattagaaagtataaacttaaaacggaccaataacgaaattcctagtgaaaaagaaactttttttaattcatatgactcaataataattttttttaactaatttagtatttttattacaataaacaatattgatgtttggaaatctttataaaaaggaatttttattttctataaatgacagaagaggctaaacattttgaagacaaatatataatgatattattagaatattaaacccaatattcattacctgttcttcctcctctattgccccacttaattctgcacctcttagcatcaattttagctcatcttcagttacatatggctcactggtaaagtaagcaatgacttcagtgttgaatttcaaaaaaatcaacaagaatatgtccaacaaccattgcttcaataaacggatgccactttccacatgatttacatactaagttggcaaaccacagttgctctttcaaaccagggttcaacaatacataaagggaaggaaaaaaaaacagttactgccttgtgctacatcattcgaccaaattagaaaccaaaaaacagaagagctgttatcaaccatctaccacatataaacccctcataattaataaaataatctcatttccccatttgttctctttatcataacatttaggaaaaactcaaccttaggaaatgaacagttatcatggagcatgggtgaaaataaaagagcaccatccttaagatgaaggaactaagatttagttagtatcagattaaaattagatttcacaaaacatctataaagaagcaaaagaagattaatctctggcaatcttttcaacagaccttattccttttaggccaagcaatttcagcatccccattgaaagataagtaacaattcttcctacaggatacaacaccagggaaagccatgccactggcctgacctagaggcattaggatcaatatcaacatcaatatttgttacaaaagaagttgaggcagaaatatcatgtaaatatgaatgatgtgtgaaaaaataaacaaaaatgactaatcagcagcatcatttctgttcccaaatattataaacgaacaggcaagaaatttacaacttaccacaaaccgagccacttctgtggcgttatgaacagctatgctttttggagtgatttcagtgagaagcaaaatggcaaccttgtttgattacaaagagaagagaaatcagatatatgagaaaaaaattatatgaaagcatacaaacttgcacaccatatgcactgttttgtgatcaatttgatgcaatctatctgattgaaaagataatttataattctattgtaaatcctataacaaaactacgaaaaatataacataaaataagacaggtatatcctataatgttgtctaaacttctgtctatggacagctttcaaatgtacaaattcaaacggatccccccccccnnnnnnnnnnnnnnnnnnnnnnnnnnnnnnnnnnnnnnnnnnnnnnnnnnnnnnnnnnnnnnnnnnnnnnnnnnnnnnnnnnnnnnnnnnnnnnnnnnnnnnnnnnnnnnnnnnnnnnnnnnnnnnnnnnnnnnnnnnnnnnnnnnnnnnnnnnnnnnnnnnnnnnnnnnncccccgacttctatcttactcaaaagttagctaaggcacctttttcacaaattggtgataaagctagcaagctttacatgtaaaattcttgttcccaacacatcaggagtttgcaagtttaatgggcagcatgttgatatactgaaagattcaatgttccaaatgaataataatcaagtggcctagtgcatctgaattttagataatcaaatcaatgcataagccctttaagcatgttttgatgtcctagaaacagtagatttttttttaacatttgagcaagaaaatcaaaacatacagtcatcactcctgttgctgcactgacaccagcttcaccaaacatagcagttgctgcttcagtgaccagagcagttgccccaatattgaccaccctgcatacaacaaaatactagcatgagaaacattctacactgaaaaaaaataggacatttttcaataataagatcaatgccaggagaatacgttgtgccaataagtattgttgtaaggaaccgagtaacatcacttcggagtagtctgaagacgccattttcagactccttttcagccaactcacgaaccttacacattgtcatcaacagatattagaattcaatgttcaaactttaatcagctaaattaatcattgtgaataacaaatctgatgtgcaaaatctgcaagcatgttaaaagaacaaaaaacatttttgaaaagaaaaggaaatataatagactagtagttgatccttaaatcaacagcatttaatttccttactaacatatacatcagttatgaaatccctaacttttagtcattcataaattctgcataattagcacaagaaatcttgatgttgcactcaggtagatggcagatgaatttctggtcagtatgatatcatgcaagatccaaacttcatttcttcaaaaatgagaaactttcaacaattggatatcaaaacaaatttcactgtcagcaatgtccccatccaatcaaggctggcaacaatcctttggccaacttccatataattatttaataggtctatactgaataatggcggtacaaaaaagagtttttgtttcctaggcatagctcctactttcatgtaatataaattatcattcagaaaaaggaggataacataaacaagatagataccttccaaggccaaagtgtagtgattgaagtctctgccatcgagaaaaaagctgaaaggcccaaaagcactgccaacaccaaaccttgctccttaaatatacaaagaacttgcaacactttaggccatgtattcctaagcaaaagaatgctctgtccaaaaacaccatatcctgcattcacaaccccttcaacggcaaaaactcgtgaacatccaaacaccaataccccacaaacagttgcagccaggatgattcccctctttaacaattcctgtataaagttcaaattggctttggaaacggcatttctatcgctcaaacaatcgctgctactacctaaacacctccaccgagttctatctagtaacttggcatctgctccaaaacttgaagcctgaagcattgtaaaagtagatggagcaacacaattgggcacaaaaggaaatgggtatctagtggttctacccaaaactttgattggtaagctctttcgccgattctcatgcgcagggcaaaacaatctggaactggaggtgaacacttgctgactgagaacccaagattcgagtgccatcatcactcataacagaacaaaaacacccaccaattcaaaatcaaaatttgatgcaaagaactgtaaatgaactcaattaaactgagaaagtagttgtattttgcttagtaatcaaatgggttaaccgagtggtaaaagaataggttgtgttatgcaacacatgaaggggaacatcaaaaaagaaaaaaagaaaaaaaaacgtatgtgcaccaaataatttataatttggggtgtctgggaatcaaaaattgcaaatgtgaaacggagaattggagtaaaattagggttttgaagggaatcgtggaaactggaagaggtggcgcgtgcattggtaggacttgctagatcctacttgccagatcccaggttcggcgcaacaagtgggttgtattttattttcaattttatattttatattctactatttcaatttttttgttaaatatattttaggtggatgataaattagtggattttattttttgatttttaataaatttttctttatgaatacctaatcaaattattattattattattattattattatgttttaattttttaatatatctatttttattcttaaatatataatcatttattataaatttttctataaaatatttttcaaaattaccaataaattagtctttaatgtttctccttcacttttcatcaacctattgtttgtttaaggcgaaataggatacaacgaattaaggagaaaatggaagttattaatcttctatgcttgtctatcatttttgtttcttttagaagatgtttcttcatcattaaataaaagggaagtaaagaactttttttggatcctacgagaaaattgtttccatccctagagataaaattggttcatatgtaggcatgaaactttttttaaaaataaataaataaattttataacataatttttttaaagtgttattttatagttagattcacttgtaatattcatccaaacaatatatcttttatatcctattttgctttgtatttttcccttgttatttctctctctctatttaactcctaatacaaacaatgaataaaggtgataaaataggttaggtatcaacatgatagaactaatttgatgaaatgtggacttgtgctttaaactttgattataaattgaattgactctttttaactcaattcaatcatgttctaatttaggttaagacattaaaagtcctggaaattaaactttcatcaagcttgaatttcattttagatgtccaaattgaatctaaattttttgtctcataattcaactcacctaaactctttataaaaaaaaagtaaatagtaatttataatattgatatttcatattaatattttataatctaaacaaaataataataaacagtaaagcatatagagattgaaaaaaccaattctatatatttatatagaaatataagttttctagaaacataaaattcaatgtgtagataatattctatatttaaactttgttttcttaatagcattccattttataacattttgatttttatttgatttgtgttatttttcctacaaaatagcaagttcttccgatacaaacatggaaaaacagaataagttaaatataaacatgtgtgacctaaaactgcatttcaaaggaagaacgagggagagggaccaatgagatttcagagtgttcaccttataaaatgggtgttggcatcgttaaaaacgtcagtataaatgattatttatgaaatattatttgctgttaataaaaataaacatgttaacgaaataattaatgagattggtatcattcacacaaaataaatattgcgcataaacaaaatgggatcaattaattaaaatacttatattaagcattcaattagtaaataaatgaaaaattactgttgagtaaaatttaaatttataacagagatgactttaaacctatatttacaacataatttttttatataatcatctgatcacaatttattatatatataaatttattaattttaaaaataattattttaaaataattaaaacgatactttataattaaattacaacataaaccgtgaatacacattcaactattttaacatacactgagcacaaacttgctagatttatatatcgtagaaatagttttacaaattcacgacaataaaaacagaggaaaagaaaacgcattaactatgacatcagcttgagctgatttattcttccatgagtcttaaacaacgtgttccttttcaccttttgattaagttaaggtccaacctttctcacaatccattgaggctttcctattaacaacacaaagcatcccatgcccactccaaataccattccacatccatatcctatggccactggttgccaaccaaatccaaatttctcttctctccaaagggtctgtgaaggtggagaattttgttcagggtccttactgcatttcattgacaatgggactccacataaccccaagtttccctcataggaatcatttgaaaaagtattgaactgttttccttgaggtatttctcccacaagatagttatgcgaaagattcaggaaggagagaaagttcagattggttaattcggtaggtatcctaccattgaccatatttgaagagagatccaatgattccaagtttgtcaaatttcccatggattggggaataagaccactaagtctgttatgggaaaggttgagccctttgagtgcatgaagctctccaataacatttggaatctctccttcaaatttgtttcctgataaatcaatgcttacaaagtttgttggaatttttgtaagtggcatactcatgcctttcattgttacagtcacagacgaagcgtatgttccaagactaaattgcgtttgcatgtattgctgtgaactgctatccacttcatcttgaatgatatccttcatggcttcaaaattttgtatgtaggcttttggtattgggccgctgaagttgttggatgagatatcaaaaacaattaaactgggaaatccaactggcaatgagaccgtgaaacttgttggcccgcaaaaccaatactttcaaatgtggtagtttttgaagccaatggggaaatgtatcctctatttgattgttgccaagatttaaaacctccagtagtgtgcagttggacaaagattctggcgaaataccttctaattggttatcattgagattcagcgtttttagcctgttgttccttgacaaagtacttggcaaagttgttgaagccaaaggatcaatgaggtattggtgaacacgaatttgagagaaaaatggcttctattactcacaagaatagaattacagagatttacaaactcaaaaaacaaactctcaaactcacacaacactcactaggaattctcactacttggatgaattcactcttggtgttttgatgattttcgttgatgatctacaactgagattgcacctctatttataggaggattttgtggtgtgaatggtgtgaagaatggtggctggaagtcaccaatggtggctgctagaagtcaccaatggtggctgcaaggaagtcatcaatagtggcttcaaggaagtcatcaatggtggctccaaggacggctggaaatcatcaattctccccctccagccgtatctgaagaaaacattccagccatgtctctgcataactctagcttctctcgagtcaccaccttcgtcatcatgtctgcaggattctcctttgtatggatctttactagtctcaacagttgtcgatccattacttcgcgtatccaatgatagcgaatatcaatatgttttgtacgggaatgatacattgagttcttgctcaaatctagagcactctgactgtcacaatgtaccttgtactccttttgcttgattccgaattcttggaggtaacgctttaaccacaacatctcttttccagcttctgcggcagcaatatattctgcttcgattgtggataaagcaacacacttctgtagccttgactgccatgaaacagctcctcctgcaaaagtgtaaatgaatcctgaagtagatttcctactatcaggatctccagccatatctgcatctgtaaagccttccaagattggatcagctcccccgtaacaaagacatatctttgttgtactcctaaggtacctgagaatccattttaccgccttccaatgctcttttccgggattggagagaaaacgactcaccgttcccactgcgtaagcaatatcgggcctcgtacacaccattgcatacattaaacttccaacagctgaagaatatggtactgacgacatctccccgatctcttccttggatgagggacataaactcttgctcaacttgaaatggttagctaatggacagctaactggtttggcattgttcatattgaatcgttcaagtactcgttcaatatatttctcctgagatagccataacatctgattcttcctatctcggataatctgcatttccaatatttgttgagctggtcctaagtctttcatgtcaaaagacttagagagtttcttcttcagctgattgatcttcgttgcatcttttcccacgatcaaaatatcatctacatatagtagaagagcaacgaaatttccatcagaaaacttctgaatgtagacacactcatctgctgcagttttcttgtacccttaactcaccatgcacgagtcaaacttcttgtaccactgcccaggtgcctgcttcagaccgtacaagcttttctttagcttgcatacgaggttttctcctgaaacctcaaaaccttccggctgctccatatagatttcttcttttaaatctccgtgaagaaaagctgtcttcacatccatctgttcaagctccaagttcatacttgcgactaatccaagtatgactctgattgaagtcatcttgactacgggtgaaaatatctcgtcaaagtcaattccctttttctgttggaatcctttgactacaagtcgtgctttgtatttcaccacttttccgctgccatctttcttcagcttgaacacccatttatttttcagtgccttcttcccttttggaagttctacgatctcataagtttgattcttcacaagagaatccatctcatccttcatcgctaacaaccatttttctttatccttatgagatactgcttcatggaaactctctggttctccatcttcagtaagtagaagatactcggattctggataccttctggatggaatccgatctcgtttagatcttcgaacttctggaatatgaggagatccaccatcatctgggtcttgtgatagtcctggaacatctggcagagcgggttgtggctccccctgctcaataccatcttcttcctcattgttttctacttctggtatatcttctggcactgcatcaccatttcttatcaatggttctgttgctgcttctggcatctgagctgcaacatttggcttctgagatattgtgggcttttcaatatcttctattgtctggctttcatggaacaccacgtccctacttctgattacctttttctcctttggatcccataacctgtatccaaattcttcatctccatagcctatgaaaatacatggagtggtccttgcatccagcttatgcctgagctccttggatacgtgtgcgtacgccaaacatccaaatactcttaagtgagagtatgatggatcctttccagaccaaagtttctccggaacttcaaaatctaatggtactgatggagatcggttgatcaagtaacaggcggctttgactgcttctccccagaatggctttggcagcttagccatactgagcatgctccgaacacgttccatgattgttcggttcattctttcagctataccgttgtgttgaggggtgcgtgggaccgtcttctcatgtcggatgccatatgatctgcaatagactttgaactgcctggaagagtattcacctccattgtcggatcgaagacacttcaatttctttcctatctcacgttctaccatgacatgaaacaatttgaagtaatcgaatacctggtctttcgtccgcaagaaatacacccacacttttcgagaagcatcatcgatgaatgttagaaaatatcggttgccgccgagtgattcaacctctaagggaccgcaaacatcagagtgtaccagactgagtaactctgatcttctcgttgaagaggaattaaacgagactctatgctgcttaccaaacagacaatgattgcaaggatctagtgcagtatccttgtctacattgataagctctttctttattagagtagacaaccctttctcactcatgtgaccgagtctctggtgccataaattttgtgaagcctcattttctgcaatgttaaggctgtcagtgcatatcttcacatgagtcttgtatagcgtgccacaaatatgtcctcgggcgactatcatagcgcctcttgacaacttccatgtgcctttactgaagtgactatcatagccctgtttgtcaaagagctattcctgacaataggttcagccgaagatctggcacatggcggacatccttcaaggtaattgtgctcccagaacttgtctttactagaacatcaccaattcctacaatcccagaggaactggaatttcccatcttcacagctccaaagtcaccatcttggtatgttgtgaagtattccttgtggggagtcacgtggtaggatgctgcagtatctaccacccattctgtgtcttctcgtgagacgtgaaggcatgtctcattatgggtagaacaaaaagctacatctccaagaatagtaactaatgtttctccacccttgttcttcggctgcgaactgctccgggcttgctcttccttccacttgtagcagttcttcttcatatgcccttcaattccacaatgatggcacttgtatgttggttttctgccatcagtggatctgcccctgctcttgcttctgcctctccatttgcttttactactcttttgttgcctcccccggttttctgtgacaagggcatgggtctgatctgtgcccatgtcatttctccttgcctcttcattaaatagagcatcctttaccatagacatggtaagtttgccatccggtgctgagttgctgagtgatactaccagcgtttcccaactatcgggaagggaactgagtaataatagcgcctgaacttcatccctaagtggcatctctacagacgacaactggttgaccaagctctggaactcactggtatgctcggcaactgaagttccactttttaacttcatgttgactaaacgcctcatcaacagggctttattccgagcggtcttggcctggtacatgtcctccaacttcttccagagggcatatgcgtctgtctcctgtgcaacatggtggaagacactattgtcaatccattgacggatctgaccaatagtttttcgatttgatttcttccactccaactccttagcagaatcaggatttttacccatcaattctatgggatcaaacaaatctttacagcttaggagatcttccatccaaggtctccacagcgtataatttgtagcagtaagcataatcatggctccggaagatgatgttgactcttctgtggtcattatcaccttgtaatagcttaattcaccaaaacaaggttgaatcttgcaaaatggagctcttcgttacgtctggaacggtcaagaatgatgaaattgacacttcaaggccaaaattctactattgaggcaaaaatagcaatttcaagaaaccttagggccaaattgcaatttcagaaagatcagggtcaaactgaaatttcagaaaaatcaggggtcaaactgaagtttcagaaagatcaggggtcaaaactgaaatttcagaaagatcaggggtcaaactgcaatttcagaaatattttgctgacgtggcatgatcgtcttctccggcgatgaacagtaactccggtcgtcttctcaggcgaacttcgggtgatgaacagtatcttccggcaggtttgaccaaactttgactgcgatttttggactcgtttgaactccgattaactcgccgtttgttgcgttggactcgattcgacgagacgaatccaatggtgcaatcaaaattgaatttcgggcaaaactcagaaaacccagaaaaacgaaaaatagaccaacacctctaaccaggctctgataccacttgttgaagccaaaggatcaatgaggtattggtgaacacgaatttgagagaaaaatggattctattactcacaagaatagaattacagagatttacaaactcaaaaaacaaactctcaaactcacacaacactcactaggaattctcactacttggatgaattcactcttggtgttttgatgattttcgttgatgatctacaactgagattgcacctctatttataggaggattttgtggtgtgaatggtgtgaagaatggtggctggaagtcaccaatggtggctgctagaagccaccaatggtggctgcaaggaagtcatcaatagtggcttcaaggaagtcatcaatggtggctccaaggacggctggaaatcatcaaaagtgccataaagtttgttcatttgaagatccaaaacttgaagacgtggtaagttcacgaggcattgtggaataatgcctgttaacttgttgtgatgcaagtcgagagcctccattgaacttgcgttgcaaattgagtaagagatgggccattttatcgaaagggggtaattttttttttttaattactgattgagggtatttttcaaaatatttacggaaaatgggtaagtcgtaaaaaattttacgacttctaaaaaagaagtcgtaaatatttttacgacttatttttttttattttatcccactgaaatcggatacaaatttacgacttttaaatgtaattttttttaaattacgactttgaagtcgtaaagtaaaatcctgcataaatatacgactcctcttttaattttatttttctcgtttatgactttgaagtcgtatttttttctaggaagtcgtattgtattttacgacttccatatacttttttttggtaaagtcgtaaaatgccatacgactttacccttttttttttttgcttttctttttttaggattttttgtnnnnnnnnnnnnnnnnnnnnnnnnnnnnnnnnnnnnnnnnnnnnnnnnnnnnnnnnnnnnnnnnnnnnnnnnnnnnnnnnnnnnnnnnnnnnnnnnnnnnnnnnnnnnnnnnnnnnnnnnnnnnnnnnnnnnnnnnnnnnnnnnnnnnnnnnnnnnnnnnnnnnnnnnnnnnnnnnnnnnnnnnnnnnnnnnnnnnnnnnnnnnnnnnnnnnnnnnnnnnnnnnnnnnnnnnnnnnnnnnnnnnnnnnnnnnnnnnnnnnnnnnnnnnnnnnnnnnnnnnnnnnnnnnnnnnnnnnnnnnnnnnnnnnnnnnnnnnnnnnnnnnnnnnnnnnnnnnnnnnnnnnnnnnnnnnnnnnnnnnnnnnnnnnnnnnnnnnnnnnnnnnnnnnnnnnnnnnnnnnnnnnnnnnnnnnnnnnnnnnnnnnnnnnnnnnnnnnnnnnnnnnnnnnnnnnnnnnnnnnnnnnnnnnnnnnnnnnnnnnnnnnnnnnnnnnnnnnnnnnnnnnnnnnnnnnnnnnnnnnnnnnnnnnnnnnnnnnnnnnnnnnnnnnnnnnnnnnnnnnnnnnnnnnnnnnnnnnnnnnnnnnnnnnnnnnnnnnnnnnnnnnnnnnnnnnnnnnnnnnnnnnnnnnnnnnnnnnnnnnnnnnnnnnnnnnnnnnnnnnnnnnnnnnnnnnnnnnnnnnnnnnnnnnnnnnnnnnnnnnnnnnnnnnnnnnnnnnnnnnnnnnnnnnnnnnnnnnnnnnnnnnnnnnnnnnnnnnnnnnnnnnnnnnnnnnnnnnnnnnnnnnnnnnnnnnnnnnnnnnnnnnnnnnnnnnnnnnnnnnnnnnnnnnnnnnnnnnnnnnnnnnnnnnnnnnnnnnnnnnnnnnnnnnnnnnnnnnnnnnnnnnnnnnnnnnnnnnnnnnnnnnnnnnnnnnnnnnnnnnnnnnnnnnnnnnnnnnnnnnnnnnnnnnnnnnnnnnnnnnnnnnnnnnnnnnnnnnnnnnnnnnnnnnnnnnnnnnnnnnnnnnnnnnnnnnnnttttaatgttaatattaaataaaaaataaaaaaattatacaaaatattaaatcaaacaaaaatattaaatgcatattaattagtaaattattaaataataaataaaatcattttattaacaattgataaacaaaataaattataaaattataaaatatcttcattaaacatatattactttgtaaattaagatatcaaataaacatatattactttgtaaatcatataaaatatcttcattaaacataaattaagatatcaaataaaatcatataatatcttcattaaacatatattactttgtaaatttttgaattataaaataacatatttttnnnnnnnnnnttgttttttaattttaatgttaatattaaataaaaaataaaaaattatacaaaatattaaatcaaacaaaaatattaaatgcatattaattagtaaattattaaataataaataaaatcattttattaacaattgataaacaaaataaattaagaaattataaaatatcttcattaaacagatattactttgtaaattaagatatcaaataaacatatattactttgtaaatcatataaaatatcttcattaaacataaattaagatatcaaataaaatcatataatatcttcattaaacatatattactttgtaaatttttgaattataaaataacatattttttataataaaataagaaacaacaattaaaattaaaaaacaaaaataaataacagaacaaaacaatattttttttaatgtttatattgaatacaaaataaattaaattatacaaaatattaaatcaaacaaatatattaagtgtattgttaaataataaataaaataatttnnnnnnnnnnnnnnnnnnnnnnnnnnnnnnnnnnnnnnnnnnnnnnnnnnnnnnnnnnnnnnnnnnnnnnnnnnnnnnnnnnnnnnnnnnnnnnnnnnnnnnnnnnnnnnnnnnnnnnnnnnnnnnnnnnnnnnnnnnnnnnnnnnnnnnnnnnnnnnnnnnnnnnnnnnnnnnnnnnnnnnnnnnnnnnnnnnnnnnnnnnnnnnnnnnnnnnnnnnnnnnnnnnnnnnnnnnnnnnnnnnnnnnnnnnnnnnnnnnnnnnnnnnnnnnnnnnnnnnnnnnnnnnnnnnnnnnnnnnnnnnnnnnnnnnnnnnnaaaaaaaagaaaaagtgaaagtcgtatacaaggaaacaactttcaaaaaaaaaataaaaaaataacggaagtcgtaaattattatacgacttccataaaaaaataaaaataaaatggaagtctgtcgcaacctatccggccgacgacggggacggcgatgaaaaaagaaaaagtgttccaaataaaatgggaaaacttgtgggagtcgccaccaacgtttatttaaggaaaacgtcggaaaaaccaaaagagataaagcttggcctacgattttagagaaaaaaaaaaggattcgggagtcgtttacgcacggggaaggtgttagcaccccatgcgtccgtcacgaagacggcagcctttaatcgagtgtgtgacaaataaagtgactttttaaattatttatcttcctttaagaacatgaattatgtttgttatttttgtttatttgaaaaagaaatatattttttatttttttagaatatagaagattttatattttttgttttttaggtcgacaagggatttgccctcgctcctacgtatccccaagtgcaatgaggaaatcagacttacgtagttcttttcttaaaaaaacttgattgggttgacttttatcttttttttttttgaaagatttatctaaattgcgcgaaaaatagtcgttaaggcgttggaccttgaaacgacattgattttgagggaaaaacggggagaatcgcttaaggcattggaccttgaagcaatctcgagtaatttgtaattttgaagataaagaattgagtgattcttcatttgagtattttttaccttcttttttttgaaagtgtgataaactctatgaattcaagcaagtcggagacccagcatgatattcacaaatctatccacgtgttatctaaacactaccaagcaagtcgaagactaagcatgaagtgcaaaatctaacaatgtattattggaacactaccaagcgagtcggagacccagcatggtgtgcacgaagcataccacgtgttattgaaacactaccaagcgagtcggggacccagcatggagtgcacgggacataagcgagtactaaagatacgaatgaataatcgacaaaatattacgtaatcaaataaatagaaagggatagaatagaagtaagggtacatttagtaattaggggtgcatacagtataaaagggggttcaagcagcagttcatattaaattacagaaatgggctaggcccagcagctatgggtgcatttatgaatatggggggtgtgaacagcattatatgtaatgtaccaagtgggctaagcccaaatgctgagggatgtgcaattatggaaaaggtggtgcaaacagtaatctaaatgggtgcagtaatgaaaatatggaggtgcagaaagccttacgaaatttgtttctgaaagggggtgaccttatgaaaacggatggtgcaaaaagtaattttcatttttatttttttttttattatttttatttttttttttatatattttatttattattttatttttttttgttgggctaggcccaaaaaaaaaaacataggtggggtgaacttatcaaacgccgggtgcaaaaagcaattcgtttttttttttggactgggccagggcgacccggcccaatgcgcatcttcgtcttctccactgcagcagttcgaaaagctgcgcgaaaatagggtttttcaccccttttggtggtttcaactccctaggccaccaccatggaggctaaatgtgcagtggccaccgcggggtggccggtgacgtgggtgggtggcggtggtgagtgcggtggtcgccggaaaagaaaacgaaacaactaacaaaacaaaaaaaaaaaagcacaaaacgtgatggtggtgttggtatggcgtggcggttcgtggtcacaatggtggagggtatggtgtgtggtggtagtgatcgcggtggcggcggtggccggtggtgttggaacgcggtggtgatcggaaaatgagaaaaacgaaaaaagaaaaacaaaactctatgaagaagataacaaaaacgcaagagaagaaaaaagaaaaaaaaacaagattacaacagatcaatagccaaatagcaacaatggagataaacaaaatctactcaaaccaagagaaatcaccggaaacaacaaataaacgaaaatgaaggatggagggggagaagaagagagaagaaggaagaggaagagaaaatggggaaatgaagggtcacctcagagacccctttgaattttcttgaccggatgacaaatggcgagctccgattggctatctctgtcttctctggaatccgtgcgctaattaattttttgtctccaccgttctctcttcctccctctattttctactgttgccttttttgctttataggtaggttttcttaacctaatgggccctatggcccattttctttctttttgctttttgctaccttgctttttattttgttacttacttttttatttcttggctatttttttttactatcatttttattttattattacatattattattattttaaaaactgttatatatttgatttgttattattattatttttttctatctttatcttttttttttatctactacttattattttatttctttttttattttctttattttctctctttnnnnnnnnnnnnnnnnnnnnnnnnnnnnnnnnnnnnnnnnnnnnnnnnnnnnnnnnnnnnnnnnnnnnnnnnnnnnnnnnnnnnnnnnnnnnnnnnnnnnnnnnnnnnnnnnnnnnnnnnnnnnnnnnnnnnnnnnnnnnnnnnnnnnnnnnnnnnnnnnnnnnnnnnnnnnnnnnnnnnnnnnnnnnnnnnnnnnnnnnnnnnnnnnnnnnnnnnnnnnnnnnnnnnnnnnnnnnnnnnnnnnnnnnnnnnnnnnnnnnnnnnnnnnnnnnnnnnnnnnnnnnnnnnnnnnnnnnnnnnnnnnnnnnnnnnnnnnnnnnnnnnnnnnnnnnnnnnnnnnnnnnnnnnnnnnnnnnnnnnnnnnnnnnnnnnnnnnnnnnnnnnnnnnnnnnnnnnnnnnnnnnnnnnnnnnnnnnnnnnnnnnnnnnnnnnnnnnnnnnnnnnnnnnnnnnnnnnnnnnnnnnnnnnnnnnnnnnnnnnnnnnnnnnnnnnnnnnnnnnnnnnnnnnnnnnnnnnnnnnnnnnnnnnnnnnnnnnnnnnnnnnnnnnnnnnnnnnnnnnnnnnnnnnnnnnnnnnnnnnnnnnnnnnnnnnnnnnnnnnnnnnnnnnnnnnnnnnnnnnnnnnnnnnnnnnnnnnnnnnnnnnnnnnnnnnnnnnnnnnnnnnnnnnnnnnnnnnnnnnnnnnnnnnnnnnnnnnnnnnnnnnnnnnnnnnnnnnnnnnnnnnnnnnnnnnnnnnnnnnnnnnnnnnnnnnnnnnnnnnnnnnnnnnnnnnnnnnnnnnnnnnnnnnnnnnnnnnnnnnnnnnnnnnnnnnnnnnnnnnnnnttcctttttttttaactttttattaaataataataataataatttttttgggtacccggacaaaattagggtatgacaaagtcgtataataatttacgacttctttgtaaaaaaaattaaaatcgtattggttgcaacgactttagattacgactttgaagtcgtaaattaaaattaaaatgcattcagaagtcgtaaaatattatccgattttgggcttgaaaaatataaaaatgaagtcgtaaaattatttacgactttctattcagaagtcgtaaatttttttacgacttacccctcttccgtaaattatttgaaaagtgcccttgatccgtaaattacgaaaaaaaaagaccccctctacataaaaaggccgtaagagatgctgccagtgagtaagttgaaacttagatccaggaatgtgagttggtagttccttgagaattggtccattggtgttgtcaacatgttatgggataggatcaaagcagataaagaatccattttgtgcaaccaactaggcactgttccattcaatttgttgttggccagattcaggattttcaaaattgggacttttcctgataattttggaaattctgttaagctcataaaagacaagtccagttgcagtaagctggagaaactataattggcacttgattcaaagttgagggataattgacttaacagcgaaagatcaagacttttcagattttgaaagttggagaagagtgaaaaattgacaggaccactgaagttgtttgatgataaacataagtaagtaaggtttacaagactgaaaattgattctggaatattgccctgtagcttgttgtagcacaaaaatagagaccgcgaggaatatgatgagattgcaggtatatgccctgtgaactgattattatctagatataaatacatcaacgatggcaaagagaaacaccaagaaggaatggtcccattcagtaagttgttagtgaacactaactcagttaggtttgaaaacccttttattttgttaggcagaggtccctctaatctgttaaatgaaagatccaagtaaatgagatgttgaagatttgaaagtgttgatggcagcttaccctgtatattgttattattcaaattcaatacttcaaatctgtttgactggtgaaagacatttgggattttaccagtgagatgattaccatagagatacagaaaagttagacgtggaagggctaagagtaagggtgggattgaaccgttgagtttgttaagtgagagatccaggaaagtaagatgtataaggttagagaaagaaggagggattggcccttggaattcagtagatgagatctgtaagatactgagagaagttgtgctacaactcaagttcggaagttggccatgaaggtcaaaattacctgatagatacaagtgttgcagatttggcaaacagagaatgtcatctgccaactttccctttaatccagttcctctaagacttagagtgatcaaagaggaagacaaattgagtggcctcattgaacttgatgacaaatctgtatgattcaaaacaagctcccttaaaactgttgcattttggagcagcctcttccaagtgctttcactccactttaatagaaactgatacttaagtggaagagagagatcaagtgattgtaatttggaaaggtgtgagatttgggaaggaatttcacctctaaagtaagtattagacaagtttaggtgcgtgaggctcacaaatccaccaaagagagatgacaagggagatggatagaaatcattgttagcgaggttgagtgattggagatgagaaagatgaaaaagggtactgttcggatggatttcaccataaagcccactgcagctgaggtcgaggccggtcacgtgaccggagatggggtggcaggtgactccaagccaagagcagcaatctgttccattttcccatgttgttgtcttcaggttagtaacagggcaatcataagcattataataataataagttgtattaatgggaaaggaggccttgaagtgaagcaaggcaaaactgtcatggggatggcataaggaatgggagaatgaaaaatgaaacagcaacaaatgccaacacacaacaaacaaccacctcatccccatgtatgattccattctaacttgtgtgcaactccaaagtgttcacacagatttactatgaaggaaaatatacatgataaagaatgaaagatgaatatttatagccaaattaacaaatttagatgtggtttatgtagctaaattgaactttgattgcggtcctagcatcaggacttcaagagcccattcctcacgcaatgtcgcaaacaaacaaaattcattttctaaccctacaataacaacattccggtagaccccagtatttccattctttgattttttttattttatattgaatatctttgtttttctctctcttgattcttagacatgccaactagaacttgattcagatagagcacattttgtaaaccttgagtgggatgatctctataactaacgagaagttttactagtaacagtagtttaatggaattgagtattaaataagataactccaataagtaacaaataaaccataatattcatatcatcatttccaattacatatgcatgtaaaaatatgtttcctggatcgatcattggcggggaaattccgtcttctatgtgccttttcaattttcgagagtatggattgaattggtctctaacgtttaagcatgattttttttaagtaaccatgtaattggtgacttcacccacttataatttcttcttcggccttcaaaagggaggaaagtttgacgagaccttttttggtctcaaacaggcttaataacaaataaattatgccactgttaccgaggtaacaaatccgacaccaagagaggcaaaaaaagattggtccacttggcagctatgccataatcaagtttgatactaactagttaagtttaggttctcttaagctaaaattttctataaagagaagaaaaataacttaaaataattgagcttttcgcatatattaattttaacttgtgcaaaattttataaaagttcctccaaaaggtgagtgaataagttgattttaatttatggaagaaactcaattcattttactttctcaagtgtttatagaaaagttcatccaaacaagggacttataagtatgttaattgggagacaaaaattcaccctgaccccatcccaggatgataaaactaaaaccttactgataagaatgaaatctacctagaatttggacatcttaaaaaaaaatgttacagtaggtttcatgtcagtgataagcagatttttcaaaattgatgttggactcagacactcagtgctgcaataagttgagcaaaaaaaaaatgacctacctctacagactaccaatgtatcttggggattcatactactcatcaagtcctgagctgagtccaaagatatcataaatcacggtactgaaaagtatcatagttcaattaacagctttgattttggtagatcatttccattttccaacatatttgtcttcatatatcagttttattttctataacaggtttgattgtgaaccacttttgacataactgtatatacgccaaatcatctcattaaatttgtcaaggactattcaaatggaataaaatttctaccccttctgcactgctaattagaagttattgccgtcattaaaactcttccacatataaatacaagcatgacttcgtttcctatttcgcttgaatacgcatctccaaatttacttcccatcatcttaataattcgatgtgatgcatggtaggacaatagggctaaagaagttaacaattcctatttgtcttcatatatcagttttatattctatagcaacttggattgtgaaccactttggacatttctgtatatacgtcaattcatcccattaactttgtcaagaactattcaaatggaaaaaggttctaacccttctgcaccgctaatgagaagtcattgccgtcagtaataattcgttgtgatggtaagacatttggctaaacaagttaacaattcctatttgtaatttatgcccattgaatgtttactttagtaatagaatttatgtaatttgattttatagaacttacatatataagaggtagatatatatcaataagttttgtaactaagagatcacctattgtatagcagcctggcaccatatatctacttaattagttctgaacttaatttcatcatttagtttgcatggagtatcaaatttctaccccattcattacgcacactgatgctatcacttacattgccttggaagtcattgtaggcaaagatgggacaaaggtaaaatgactgctttgattttattgatctatgagatttagagcttttatatcctcaattaactggcaattattatgtctaaaaaacatctttttctactccatctaaaccctattaaggttgttgccagaaccactagtggagttgacttggaagtcaatgccctaaataatgggacttgggtttgattttgttgggttacactcagaaaacaaatagttgtgtagaagaaggaagacagaatgataaagcttgtagaatgtttattgattcattttgtttatttcacataagcactctatcttatacagattgtacatcacaaagttagttaataactagctaaccaactctatgtaactaacaaaactaacctatttgaactaactaactaacacccttctttaattcaaagaggtaaaactcttaattcctttcatagcttctcaaatcgctcaactttcactgctttagtgagcacatcaacaatttgcaattctattggacaatacacgatttcaatcatccccttattcacctgctccctcagaaaatgaaattttgtttcaatatgtttactcctaccatgagaaatcgggttctttgccatattatagcatacttgttatcaactaacaactgcattggcttcttcgcttcattaccattgcttttcttttaaaaaaaaattgatagctgtagaatagttgcgaagttgggtatgttttttttgttgtggttaaagaagtagaaggtgacgtgcaattgtgatcgaatattaaaatttcaattttctataaaacttattcgtctacattaaatattaatgtatccacacaaaaaatcaggcaccacattgtcaaccctcactttattcaacagcggagcaggttgaatggatgatgttcagcagttctctgattggctatctacatggttgaatggatctgattgggaagtgcaagaaaaatatgcgcaacagagataaaggaaagaagaattaacatacagattttaagtagaaaatcctttcagaaaaaaaatcacgagcaaatgagaaacaatttactatgtggaaaaaaaaaggttcaagagaacgcatacaagcggttaggttacagcagcatatatattgtaactgctaatgtaaaaccttatcacaataaaggtccatatatacagcagggatggctgctaccactacagacccccgaaaatttctcaaaatatttttcaccaaaaattcgggtcaccaattctaacatgaagaaatcattggctatttgattgagagtagattttggacagtggagcacgttaattattgcaaaagcagatatatactgtttcagtctttaaaggggcgcatgcatgattttgatcaataatctttagaagtttccaccccaagatgtagttaaatgcaacattgatgcctaagtgaacaagaccaaattaaggtacaggatttggtataatttatctttcgagattggagaggccggccggtgatgttttagcatccgcaaccagatgttgctgaggtacttaatttgtttgagatgggccattataacagctgcgcaggcattgttctctcatgtgatgtttgaaacagattgcaagaaactgcatgcatgatacatggcagaaatctagtaatagaaagagtcatagacactggcggatctaggatcttggatcagtgtggacaatttatttaaaaaataaaaattgataattatcattatcatatgagatagttggattcaaacacgaagataaaaggtacaaaatataaaattttaaaataaatatttgtattttattaaaataagagagtgcatttacttagtcttacatgtgaactggtaaggagaggttcaaatacataaaattaggaggttcaaaatataaaattacgggatacaaaatataatattttttttacattttattaaaataagatggtgtatttacttactcttacatgtgaaccggtaaggagatccaaatatataaaattagagggtgcaaaatataaaattatgagatacaaaatataatattttaagacaaatactagtgattttattgaaataaggggatgcatcggccaccctcatcgccatatagatccgccggtggtcatagatactttgcatctttgaactttggtagatgaatgcagaattaattttagcccgaggacttaattcattttccttatctcatacatactccacgataattttagtttcaattaattttaaaattttcttttatattattatttttatcttcaatctcatttacttttactttatttttttcttttaattttctttaaaaagtgtttttaattttcttcttgaatttacactacctacttgcttagtgcttaatatatttagttaattatttaaattaattatatacagtatatgttttttttttttcaattttttttcttgttaaatttccactattnnnnnnnnnnnnnnnnnnnnnnnnnnnnnnnnnnnnnnnnnnnnnnnnnnnnnnnnnnnnnnnnnnnnnnnnnnnnnnnnnnnnnnnnnnnnnnnnnnnnnnnnnnnnnnnnnnnnnnnnnnnnnnnnnnnnnnnnnnnnnnnnnnnnnnnnnnnnnnnnnnnnnnnnnnnnnnnnnnnnnnnnnnnnnnnnnnnnnnnnnnnnnnnnnnnnnnnnnnnnnnnnnnnnnnnnnnnnnnnnnnnnnnnnnnnnnnnnnnnnnnnnnnnnnnnnnnnnnnnnnnnnnnnnnnnnnnnnnnnnnnnnnnnnnnnnnnnnnnnnnnnnnnnnnnnnnnnnnnnnnnnnnnnnnnnnnnnnnnnnnnnnnnnnnnnnnnnnnnnnnnnnnnnnnnnnnnnnnnnnnnnnnnnnnnnnnnnnnnnnnnnnnnnnnnnnnnnnnnnnnnnnnnnnnnnnnnnnnnnnnnnnnnnnnnnnnnnnnnnnnnnnnnnnnnnnnnnnnnnnnnnnnnnnnnnnnnnnnnnnnnnnnnnnnnnnnnnnnnnnnnnnnnnnnnnnnnnnnnnnnnnnnnnnnnnnnnnnnnnnnnnnnnnnnnnnnnnnnnnnnnnnnnnnnnnnnnnnnnnnnnnnnnnnnnnnnnnnnnnnnnnnnnnnnnnnnnnnnnnnnnnnnnnnnnnnnnnnnnnnnnnnnnnnnnnnnnnnnnnnnnnnnnnnnnnnnnnnnnnnnnnnnnnnnnnnnnnnnnnnnnnnnnnnnnnnnnnnnnnnnnnnnnnnnnnnnnnnnnnnnnnnnnnnnnnnnnnnnnnnnnnnnnnnnnnnnnnnnnnnnnnnnnnnnnnnnnnnnnnnnnnnnnnnnnnnnnnnnnnnnnnnnnnnnnnnnnnnnnnnnnnnnnnnnnnnnnnnnnnnnnnnnnnnnnnnnnnnnnnnnnnnnnnnnnnnnnnnnnnnnnnnnnnnnnnnnnnnntcacgggagaacaaatattatttacaaactacgaattgcagaagtactaccaatcaagatcaacaaaaccaaagtactaccaattaatatcagaggacctgattgatgtgtccaccagttattaactatttcattggttattcacatttctaattattctttaataaatttagaatcctactaaccaatacttttagagcattaataatagaactaaaatgaacaaatattttttgtgaagattgtatgaaaatgtaaaaaagtcagtcataaacagtataattttatgcatcccataatttttttttttaatttcttaacccatactataaagacacaggttactatttgtcaaaaatttattagtatctcatgttacttggtaaatctaatattgaacttcccctaaatacagttgttttactattatagctggtaagttcccaatggaactactccgattgaggaaacataaataaatgaagcatttggcatcaaagaaacaaaatagattcaattttagatcccattctttcaatcctattactatttcagtaggagcataaagttaagccgctatgattaagtaaatgttccaagaaaacgagaacttggtttccttcaaaatgctcataactcattttttggtaagtcacccctcccccatcacccatgttcgtatttcttaaatttaaaatactttattaccttttctccttttgtccttattatcttcttacattcaacttcaactatacaaaagtattcaatcaattctgctcaagttaacgttggctacttaaaattggtatcaatctcctgcttcaaacgttaggtcatcttggtacttaatttatcgattttcaaaattcaatagacctttaatcactgagatgaatctaaggtaagcaaagatatggacgttactagatattggaatgcacagtttctctacatatctcgttatgcatcaatacataattaaacacatatattagataacatagaatttatcagttaaataaagtacatttaataaatacaaacatactgtgactaccatatctgcaatatacgattccaacatgtgaatacttttaaaactaagcactaatctaaacttctgcatataagattggctgggaacctcctgctctagattttgcgagtgaggaagtaactggacaaacaaaagactgagtgagttgttttcaatataaccacacaaaagggtatatggctaaggatatttaacatagctcattgctccatttaccttggcaaagagtttactccagaactgtctggcgcagtttttcttctcttggggggattcccttcgtcaaactcaaatgaatcatcatcatcagaggatgtggaagtagaattctgcatatcagataaacattttgttttgatttcttcaatcctttgtgcttctgtaaacatgcttttgtgctggattgcatacgatgaacttggacgttcattttctgcaataatttgagaaatggctttctttccatgcaatccttttgatgtacacccatcaccatcatcatcatcatcatcatcatcatctaggtttatgatcacattttccaattccaatttgaaccctgcaggcacaaaggagatatgttaaaacttacataaaatttatttttgttaacatgatacttcaagcaaaagctaggagaataaagattagtagattctgtaatacaaataaaaactggttgttgcctcagcatttgatgaaaatccagcctcaagctcttcaagtgattaacaatgtatacttttatcaaattcatataatatgtagagaagggtatcatgtaatcttgtttgtatgggagaaacaagttatcttgcctgcttttatttgttctttcttttgttcccatcgaaagaaaattttatcagggggaaaaaaaaatcacaagagatggcttgcagttttctaagggaacaaaaatataataggactctccaaatcaaaggaagacaacaggaacaatactgtgtttgacttgagataacaaaggaaaattgaccttaggcttcttttcacaagtagactcttaaggctgaaaacgggtaatttggtgctataaagctccctgtgtgggggtccaaggaagtgtctgacctacagtgtggatcaattgtgggcagccttaccttgcatttgcaagtagacaccttaggctattctccaaattaataaattcattgtgtaaacatggtcaatcaaacttgaaacttatggggaactgtgacattttcacttcaaaaacaagattgggtgctgtgaggagtgtatgttcttaagttgtgtctaattataattgcaaactgtgatgagcttttaagtattttaatgtgatctggttcagtcaccaattcatccaatttgagcaataattagtggccccaccagttcaattaagttactaaaacatggctcttgaccacagccaataccaataaataatcatcatggttcaaggcccagctaccaagaaatatgaacagaaacaatgcattaatgcattataaaaatgcaaatctaattcttgatgcattttttttgttcatatttcttggtagctgggccttgaaccatacctgatgcaagcagaattccctacctgatgcacctagagcatccttattccctttgctacgagactgagcatcaattgagtgacgagtatcttcattcctttggaaaggaacatggcccccagtgtcattttcaagctcgtagtcaccaacctcttcaactttgacagtaattccttcagcttttaagcaatctaacaaagactgtgtagcatcttccaacttcacaatcttgacactgatttccgcaaatttcctctctaaattctccatcaatgtctcaagtctgcacttctcatctgccaatttaccattttcggtcctcaacccctctatggcggtcaatttaatcttgattgcttccttcaattcactgttctttgtgctaagggcatcaagagcactcttctcccgaaccttctccccctccaaaacatgaatcttgctcctaagttcagccacatcatctagccattttttctttaattccttcagctcacagacttcacattctagagcaagattctttttccttaacctctctatgtctgtcaaattcttcttgatcgattcctccaattcactattctttgtgctaagggcatcaagaacactcttgtccccaaccttctcctcctccaacacactgatcctgctcctaagttcatctagccattttttctttaagcccttcagctcacaattttcacgttgtaatgcgaggctcattttccttaactcgtcaatcatgtttttttcaaccaaaccatttttcttcacttccttcaacaactgctcatagttttgctgtgctcttttccccttttcgcattgctcatctctatttttaagtttttcttcggcttcaatcctcttgagcctctccacctcgatcttctcccggagtggctcaatctctgccttaaatttggcgtccctgttcgccaattcttcctcaactttgtcaaaatcctccgtttgaaacgaaacacgcaaaaccgagacaagctgagaaatgctcatctctttatagtttttctgggtggtggaagtggacataggcggagacctaggttcgagtttgagttggaaggccatgagaatctcaaaagtcgcaaactttgggggggaatgggcaaaggaagaagcttgcgttacaattgcttgctacaagtaaagttcctgtgaaaaaaaaaaagaaagaaaaaatcagtggcagaatgagactttgttatcagtatcagagaatgaaggaacgtaagaagaagtgagatttgcacgtactacgctacgctttctatgtcacaatgattaaaaaaaaaaaaaaacacgttttttcaaggtagggagagtaagaagatgaagtgagaagaacaggaatagggaaggcctaactgaacaaaaaccaaagccagttttgaagcctatgaaaataaaaaggatttgaatgagtaaagttttgtgtctgtatgtcaaataagaccaatacaccttttcagtttcggtaagctaaaaggacgcattcctagcgagtaaacacagtgtgtgttcacacccaattggaatgactaatatactcatgcatttggtcaaaaacaaatatatatatatatatatatatatatatatatatatatatgatcatgcattaattcacattgcttttaatttgactttgactaatatttttatactcttattttctgcatttcggtaagttccgtttttgtctttcattttcaaaggagtttatacctttttaagtgaaattaatgtgtatagaagaaaaaaaatacacgagattttagccctatatactactaggatttatcacttattgggtgatgatagatgttcttgaaacttcaaatatccattagtactaacacttatgtctccaaatatccattggtttggaggatgaggtgaaggagtggtgtgtaagtatgttaaattatagaatcctttctttactgattgtttatcaaggattagtgatcgggactaatcttgggttagaggatgttgaataataataaatttaacttagctatattggatttagttattaaattattcaatatctaaaaatatttaagagatgtttagtccaaaatctagaataatttattctagatattttcataaaaatatctagagaataattatatctagaaatcacaatcataaatatctaagccagctagagagtgtggagaattctaaaaaatgatttgtagtcattagataagaattatgttggcaaaatcttactcatagattaaagaggtgctattactataaatatgaaaattcttcaccattttatatcaagccaatagataaaaagagttgtgtataataaaatattctttttctccaaatctttctaaaattttctttttctcaaatatcctctttccaatattggagtagtggcaactggttaatcacaaatttgagaagagtttaacgttgtggaagcataaatatatttctcttgggagagggtttgtttgataagttccatactatcatccatatgactatttttcctctccttttgcaaaattcctacggtagtgtgcgctaaacttgttggaatacaaaggcagtttttgtggggagggagtaatgatattaataaattagcttgggtgaaatggaatgatatttgtcaaagtaagaagaagggaggtcttggtgtcaaaaagattgagttgttcgatgagattcttttggagaagtggaggtagaatctctttcacaatcaaaaagggatatggggtgatgtactgcagtcaaaatatgatgggtggtgtggtcttttgagtgaggatagctcttcgttggaaagcttgtggtggagggacttaaagagggtgtgtagggggcttaatcaagaaaaatggtttgataatgggatccagtggaaaataggaatcagggatatagtgagattttgggttgatacttgggtggatggaaattgttggcaaactagtttccaaggttatttttaatctcggaacaaaagttggagctggtctggaatatgggagtttggaggaatggcatatggtcttgggagtttttggtgaagagagccttttgagtgggagagggagatatttttacaactaacaactcttttggaaactgtgcaggtgcataacaacattgttgattcttggatttagagagcaagccctttgggcacttaatctacaaattctgcatattcacaatgaacactagatggtggctcagaggccctgcacatcaccttagcagaggtatggcggataaatataccaaggaaagttgcatttttaatctggagagcattgagagataggcttcccaactaaagataactcgtggaagaggggaattatcacagatgaagctgagttgatgtatccactctgtaatcaacaagtggaaaccatgcagcatatactcgtaaaactgtgaagctgtgtttaaaatctggttagaatgtcacagttggatttcgccaggttttgctctagctttaccggaatcacttcaagatcatttttggctccactcgggcattggaaggtcttcagccgaatgcaatatatggatggttatatggtgtgcagtaattttttgtgtctgtaagaaaaggaataaccttgtttttaatatagattctgctcaaagttctgatatggtacaggatgttaacttctgtgtttggtcatggttgagatcattgacaccaggctttacttgctgttttgtccagtggagtagcaacactcccacttgccttctttgtgcctaatcggaatgctttggtgagttgggcagagggttatacactggagatcaacattgtggtgttgtgttttgggttgcaatgggtaaggctaaggtgcagagttttttgtaacaggagaagggatatgttatctggggtgggtataattttctgatatagaaatatgcagattccttgagatgttcaggctgttagcttgaggttaataaatattcctatgtcagttgatattaatacagcttaacctcattgcttcaagttggatattctctttttgtaataagttttttatttgggtaccactggtaccaagttaatgatatttgtttgctaatttaaaaaacaactaatacttatgtctcatctgctggggatttttttgtcttttatgtttaaaatatagcaaaagttagcatgatatcaaactaaagtaatttttaaagtaaattattttacacaatggtcaaattatatgttctaaagataagaatgatatagtataaaattatcttaattccaaatttagataataagattttaaatttaagtcaaccaatccctattaagtaatttttaagattattttattaattaattaaaactataagatctataggaaatatatagtacatagaaaatttaaattttttagccaaaattaaataaaatcaagtacaaatattaattattgactaaaatatttggtaactttgtaacatgatgcatatttatatgaaaatatatacagagtttttcacaatctatctattaaatagagtaattnnnnnnnnnnnnnnnnnnnnnnnnnnnnnnnnnnnnnnnnnnnnnnnnnnnnnnnnnnnnnnnnnnnnnnnnnnnnnnnnnnnnnnnnnnnnnnnnnnnnnnnnnnnnnnnnnnnnnnnnnnnnnnnnnnnnnnnnnnnnnnnnnnnnnnnnnnnnnnnnnnnnnnnnnnnnnnnnnnnnnnnnnnnnnnnnnnnnnnnnnnnnnnnnnnnnnnnnnnnnnnnnnnnnnnnnnnnnnnnnnnnnnnnnnnnnnnnnnnnnnnnnnnnnnnnnnnnnnnnnnnnnnnnnnnnnnnnnnnnnnnnnnnnnnnnnnnnnnnnnnnnnnnnnnnnnnnnnnnnnnnnnnnnnnnnnnnnnnnnnnnnnnnnnnnnnnnnnnnnnnnnnnnnnnnnnnnnnnnnnnnnnnnnnnnnnnnnnnnnnnnnnnnnnnnnnnnnnnnnnnnnnnnnnnnnnnnnnnnnnnnnnnnnnnnnnnnnnnnnnnnnnnnnnnnnnnnnnnnnnnnnatcaagcatttaaagatactttatcagatataaaaataaaatctacctagaaaatcatataaaaaaatatttcatattaaaatctccaacaatttagatataaaaaatttcaaataggtgttattatgggtaatgcttaatgataagtacacaacacccaaataataagtacacaacacaaatttcaaatatttgactagcatagagttcttgactattgacttagtttgacaaacaaactctaatctatatggtgatatagattgagactagttagtttggctaacaaattgatgtagtcaacaatcaaatgaaatccatgctccattcacacacacacacacaaaaaaaaaaaaaaagaaatccatgctattataatgtttgagagcaacctcattttaataacacaatagttatggccttaacttgtagctgtgtggtaagtgataggaatcaactgcaaatcctgttttctttttactgtcaagccaaaggattcagtcatatcaagttcctcaggcctattcccttgagccattttccagtcaaaatggaaaagcaaatttgcaagtgagaattcaacattaaccatgccaagattgatgccagggcatatcctccttccagctccaaatgggataaactcaaaatcaccacctttgtaatcaaatgggctatcaaggaacctttcaggaataaatttctcagcatcaacccaatagttaggatccctcccaattgcccatgcattaacaatgattttgcttttggttggtatctcatacccattaatctcacatctctcactgcattcccttggaagaagcaatggagcaggtggatataaacgcaaagtttctttgataactgatctcaagtatttcagttcatgaatacttgtttcatccacatatccttttccatcaaagacccttcttacctcaatttgcactttctccatcaccctcggattcttcactagttctgacattacccaaaccattattgttgatgaagagtcgcttccagcactgaaaatgtcctgacagaaatgttaaggtgttagtattacatttctaatgagattaatcgataataaccagaatttatcatagaaagaaatttatcagtttaatttaatgtaagtcatagtttaagtgtgaataacttaaaaccggcacttcagttcaaaacattagatcaatattcattacataactccatataaattaaaatatgaagtgcacccgggacagctcttgatgactgatgaggtagtctactaaatgactcagatttggaaattttgcacggttttctatatgtaaaatattaaacaacaagattgctttgatacactctttctaacgcactccttctatcaagttcggatcggatcctctctggcctgttgagcaacatgcagcctttttgacatactttctattactagttaaaatttattaaaaattataaaatcataaataaggctaataaataagaagtatgacctacaaatatgtaattttaataaatttcagtcaataaaaagtgtgttcaaaatattgtattagagaatttgtcattaacatttctcttgtaaaagatgtacaagatcaatataatcaatcctattttgactgcatcaaacaatcatcaattgagagaagaaaaaaaatcatacctagaactatttgattggatataattatctttgccttttgcatagatttttaacaaacatactaaccaaaatggttgctttgacaacagtgtcagacagggggtgttggaggtcaccattcttctgaagccttaaaagaacatccactagatcttccgctttttcttcaccaacagcctttgtgtccaaagttttttctctgtgatccctaacaatgctctcaagtatcctatccattcctcgatggatcttctcaactctagtcctaatcccagtaagaacttgtagaagtccaatggaaggatacaaatcagcaagagaaaaccctgtaactgtgtcagtgacatccttcatatgctctatataagcctgttggtctttcgactttttaccaaaagcaatccgtgatagtaacccatatgccaatgaactaatcttctcactgatattaattggtgacccttcactcaaagatatctctttgacaaaaattgacaactcttgtttcctgactgatctgaaggactggacatgcttttgtgctagtagttccatggtgcaaatctttctcatctgcttccaataagttccttgtgggctgaaggtcatgcccttagagccataagtgataacatcagcagcaagcacataaggcctatttgcaaagatgatatcatgtgtgttcatcacttcttttgccatttcgggcgaagataccactatgcagcaaagctcaccaagctgcatgtgcatgagagaaccatattgacttgccaatcttgctagggacctatgaggtagagttccaagatgatgtatgcttcctaggaggggtagcttccttggtcctggtggcaacttggagtttgaattcttggtctttgatctccaaagtgtgttgattagcatgaacactaagaggaagaaaggaaggattatagataaggaaatatgaagctccaaccccattcttataaatcaagattataaccttgaaaaagtatggtttgtctgtgaagtaatgttgaggtttaaaccacaaattcacagcttggtgctgaaacgaggaaatatagctggtactggtgcgcctgctgctgctttcttagcttatgagaaaatggactgatttttaattagaaattaacaaagatagtggtaagaaaagtcgtcgacaattaatatttcaaaaatggctgcaagcatgacttttggccacacgtttaattttcgatgctgaggtttatctatatagtcattagattagttcttcgaaatgaacagtggatattctcgaacacagattataatcttaattcttatgatactgtgtgtatatatttaagataaatgataaatgataatttgtaatataatagtttaaaatataatcattagaaaatgatttatttacttacttcttgaattagtattattgaacttaattgcttggttgaataattttttgtaaacattaaattctgggttagttttttttaaaactaaaagttagaaagaaaatgattttaattaaattaattttgaactgttaagtgtaattaagatgtatgtaccaatttaaattgatcttaactacaaacttaacataaaacatgttttttattaaaaaaagtatgaaaaattaatttgtaaatactaaaacaagtaggagcttcatcgattcaatcaatgattgatagtccttgataaataaattaatggaaaaaaaacccatataatttgatcagaagtggtgtccatcagtgattccaattgaagtgacgttgaagaagttgaagctcttgctatttagatgggtctcatacatctattctttgattttgatagcaaactggtggtggataaaatgattacttcatcagcctatgcttctcaagagtgtcgagccttattggatgttggttttgtcagcctaatgatgttggcacgtgtcttgttatggtggctctatctagggtgctcatgataatgttataaaaaatttaattataattataaaatacttttattataattataatgcacaaaatcagttataaaaatgtagtaaatattaaaaaattcatttttttatttgagtttaaaggttaagcatgaacaattaaaataattttatactaccaatagattaaaaatcaccatgtaaacctatttataatgtcaatatatcatctattttttctctttatttttaaaatcggttatatattcataacaaattatataaacatagaaggttatgaatggacacccaagtatataaccagtttattaaaaataatattttgtcatattttttttttattggtgaattcaatatttggttatactaaaccttaaccagttatatacaattgactatgctcatggttatttgagtaaccaaaccctgaaccgtcgtagttccatcttaatctagtctttatattttttagcaatttttttgtgtattgttcatttgattattttttgtaaggatgttcattnnnnnnnnnnnnnnnnnnnnnnnnnnnnnnnnnnnnnnnnnnnnnnnnnnnnnnnnnnnnnnnnnnnnnnnnnnnnnnnnnnnnnnnnnnnnnnnnnnnnnnnnnnnnnnnnnnnnnnnnnnnnnnnnnnnnnnnnnnnnnnnnnnnnnnnnnnnnnnnnnnnnnnnnnnnnnnnnnnnnnnnnnnnnnnnnnnnnnnnnnnnnnnnnnnnnnnnnnnnnnnnnnnnnnnnnnnnnnnnnnnnnnnnnnnnnnnnnnnnnnnnnnnnnnnnnnnnnnnnnnnnnnnnnnnnnnnnnnnnnnnnnnnnnnnnnnnnnnnnnnnnnnnnnnnnnnnnnnnnnnnnnnnnnnnnnnnnnnnnnnnnnnnnnnnnnnnnnnnnnnnnnnnnnnnnnnnnnnnnnnnnnnnnnnnnnnnnnnnnnnnnnnnnnnnnnnnnnnnnnnnnnnnnnnnnnnnnnnnnnnnnnnnnnnnnnnnnnnnnnnnnnnnnnnnnnnnnnnnnnnnnnnnnnnnnnnnnnnnnnnnnnnnnnnnnnnnnnnnnnnnnnnnnnnnnnnnnnnnnnnnnnnnnnnnnnnnnnnnnnnnnnnnnnnnnnnnnnnnnnnnnnnnnnnnnnnnnnnnnnnnnnnnnnnnnnnnnnnnnnnnnnnnnnnnnnnnnnnnnnnnnnnnnnnnnnnnnnnnnnnnnnnnnnnnnnnnnnnnnnnnnnnnnnnnnnnnnnnnnnnnnnnnnnnnnnnnnnnnnnnnnnnnnnnnnnnnnnnnnnnnnnnnnnnnnnnnnnnnnnnnnnnnnnatatatatatatatatataaatatttatattctttttcacttgcaatccgtgcaaatcaatgttatattgatatatcacacttccattacaaatccaatgtgcaaactaatactaattttttttacatttagtttaattccttatatttttcaaatagtcaactttaatccctatgttgaaaaaaaagtgttaatttagggtacaaagtttaagtatttaaaaaaataggctaaattacacaagtgtggattcaaatctcttttacctcatttttcttgtttgatggataaccctttttaagaactaattgaatagatacaattaaatgaaattgtttgtagttcgagactctaccataattctttaagtaaatctctaccgaaagtgctttttctttctaccatttttactcaaaaaaaaaatcttattttattagattcaatttgtctattatcttttaaagaaattaatttaatccttaatgtcttaaatttaggtgaattggcgtttccatcagtttagaattaattaataattttaacaaagacagttagaaaacgacataaaataatacttaattgacttaaacatgatttcgcacgcataattaatatagggacaatttttaactgctaaaagagtatttaaaattataaaaaaaaaattaaaaccccttgctcgatttctctcgtacaatctgatttttttttaaaattaattaaactcatattccaatttctggagttatgactgtgaaatacggaaaataaatttaaagggcttgctctatgatacaagccaaatttaaaaaagagaaataaaaaggatgacaatacttattgaccacatgtggccaatgcctgataggaactacacacaacaattatggccttttagcttgagaaattattttatggtgttggattgcatgcctatatcacaagttgtcttggtgattaattggtcatggattcgaatttgaaaacaatctctttttatatataaggataaaactacttacatatcctgatttctttttactgtcaagccaaacaattcagtcatgtcttggggactattcccttgagccatctaccaatcaaaatggaaaagcaaatttgcaagagagaattcaatgttaacaatgccaagattgatgccagggcatgtcctccttccagctccaaatgggataaactcaaactctgcacctttgtagtcaattgatcatgtcaattaaaatattgtaggatgtaagattgggagctgcatctattttcatttattcaaggattctcagtgcttcctcaacttttccctttcttccaaggcaagtcaggatgcaattatatgcaattacactaggtatacacatccctttctcttttgcctctcaagtaagctgtatgcttcatcaaatttcccaactgaaccataacccattatcatggtattataagcataaacacaaggaacgctcgtgttgccatcaagttcctcaaactactctacagcttcatccaccctctcatccttgcaaagaacccctatcatgctagtatacgtcacatcgtcgggcaccagctcttgtgatttcaattcatgaaagaatttccaggccatatccaccttaccaacttttccaaaacagtttatacatacattataaaggacaaggtcatcattaaacgagttactcttcatctcatccagcaaggatatagagcagcatcaacacggccctcccttgcaaacacacgaataagcgtggtaaacaaatgcacgcttacttcataacctatttcctgcatttgacgcaagagagtgagcatgggatcagcttcaagagctgcagagagagcaccaatcagcgttgtataagcagggggaaacttgaacttcctcattgtttcaataactccaaaagcttcccctagcttcgcaacttgacaaaactagcaaccatttcgatacaagtattattagagggtccaaatccagccatactcatttcttcaagaatctgttccaagtactccaaatttctggtcctcgccataagcatgagaagtgcattgtaggcttcagggcaatgcggttgttccgttttcctctccacccacctaaaataatgcaatgccaccctcacatccttcaatctcctgatcactccaacaaccaactctggttgaggcatttcataaaacgtgttgaaaaaatcatcaagggcaggtccccaaggctatgtgtccaacacccggcagatatcgtgcactgtctttctcatgccctccaatttgaatgcattgtcttgggaatgggaggcatcatccataaaggaattaactttaatatacctttcagggggagacccatttggaaaagacgatgaaaacttgcaggacaaagggtttcttttcccacatttgaaaacagatcgttacttcagaactgcaaccaaaattaaaagatgaaaatcagattacaaattgcaaccgtgaaacgggtatatgataataagaatgcaactattttaaggatgaaaaacaaataagaagaccttgtgcccttgagagaatcttcatgttctcacaacacacacacacaaaatataaaatcagaaatggagagagattaacaaaaaaaagtgaagagaaacagagtaaagcaagagcgagagccaagaacaaggagaagctcgtagtgttgttttttatttgtaacgtggtttttcttttttctttttttcctttttctatctgggtggaaaattaattcattccgagatacttcgaaatataagaattttttatatatattaaaatgagttttttttaatatttataaagcattttttgaacacgtttagtacatgttacaatgcggtgtttagttttagaaaaatagttctcttgcatcctttacatattttttacgttcaagaggaataaaagaaaggagatgggaattatttttatttagttgaaaaattttaatacgagaaggaaaaattaaaaaagttgattttcattttttttcgcgctgttctggtattttttttgttagatattgataagggtggcaattagatccactaaccatccaaccattcgtgtataaaattcatccaattcattcaaaagtaaaacaagacccaattgaaactaaattaaataaggttaaattattttttaaataccaaattgttaagataatttttgtacatgacacgagtgataatgtcaatattattgtagttcatattaaaattaagttttactttaattaaatatacaattgaaataccattatttatacaatactcttttttttaaataatgttaattttcaaaatatttataaattagcattaaaatgttattaattgnnnnnnnnnnnnnnnnnnnnnnnnnnnnnnnnnnnnnnnnnnnnnnnnnnnnnnnnnnnnnnnnnnnnnnnnnnnnnnnnnnnnnnnnnnnnnnnnnnnnnnnnnnnnnnnnnnnnnnnnnnnnnnnnnnnnnnnnnnnnnnnnnnnnnnnnnnnnnnnnnnnnnnnnnnnnnnnnnnnnnnnnnnnnnnnnnnnnnnnnnnnnnnnnnnnnnnnnnnnnnnnnnnnnnnnnnnnnnnnnnnnnnnnnnnnnnnnnnnnnnnnnnnnnnnnnnnnnnnnnnnnnnnnnnnnnnnnnnnnnnnnnnnnnnnnnnnnnnnnnnnnnnnnnnnnnnnnnnnnnnnnnnnnnnnnnnnnnnnnnnnnnnnnnnnnnnnnnnnnnnnnnnnnnnnnnnnnnnnnnnnnnnnnnnnnnnnnnnnnnnnnnnnnnnnnnnnnnnnnnnnnnnnnnnnnnnnnnnnnnnnnnnnnnnnnnnnnnnnnnnnnnnnnnnnnnnnnnnnnnnnnnnnnnnnnnnnnnnnnnnnnnnnnnnnnnnnnnnnnnnnnnnnnnnnnnnnnnnnnnnnnnnnnnnnnnnnnnnnnnnnnnnnnnnnnnnnnnnnnnnnnnnnnnnnnnnnnnnnnnnnnnnnnnnnnnnnnnnnnnnnnnnnnnnnnnnnnnnnnnnnnnnnnnnnnnnnnnnnnnnnnnnnnnnnnnnnnnnnnnnnnnnnnnnnnnnnnnnnnnnnnnnnnnnnnnnnnnnnnnnnnnnnnnnnnnnnnnnnnnnnnnnnnnnnnnnnnnnnnnnnnnnnnnnnnnnnnnnnnnnnnnnnnnnnnnnnnnnnnnnnnnnnnnnnnnnnnnnnnnnnnnnnnnnnnnnnnnnnnnnnnnnnnnnnnnnnnnnnnnnnnnnnnnnnnnnnnnnnnnnnnnnnnnnnnnnnnnnnnnnnnnnnnnnnnnnnnnnnnnnnnnnnnnnnnnnnnnnnnnnnnnnnnnnnnnnnnnnnnnnnnnnnnnnnnnnnnnnnnnnnnnnnnnnnnnnnnnnnnnnnnnnnnnnnnnnnnnnnnnnnnnnnnnnnnnnnnnnnnnnnnnnnnnnnnnnnnnnnnnnnnnnnnnnnnnnnnnnnnnnnnnnnnnnnnnnnnnnnnnnnnnnnnnnnnnnnnnnnnnnnnnnnnnnnnnnnnnnnnnnnnnnnnnnnnnnnnnnnnnnnnnnnnnnnnnnnnnnnnnnnnnnnnnnnnnnnnnnnnnnnnnnnnnnnnnnnnnnnnnnnnnnnnnnnnnnnnnnnnnnnnnnnnnnnnnnnnnnnnnnnnnnnnnnnnnnnnnnnnnnnnnnnnnnnnnnnnnnnnnnnnnnnnnnnnnnnnnnnnnnnnnnnnnnnnnnnnnnnnnnnnnnnnnnnnnnnnnnnnnnnnnnnnnnnnnnnnnnnnnnnnnnnnnnnnnnnnnnnnnnnnnnnnnnnnnnnnnnnnnnnnnnnnnnnnnnnnnnnnnnnnnnnnnnnnnnnnnnnnnnnnnnnnnnnnnnnnnnnnnnnnnnnnnnnnnnnnnnnnnnnnnnnnnnnnnnnnnnnnnnnnnnnnnnnnnnnnnnnnnnnnnnnnnnnnnnnnnnnnnnnnnnnnnnnnnnnnnnnnnnnnnnnnnnnnnnnnnnnnnnnnnnnnnnnnnnnnnnnnnnnnnnnnnnnnnnnnnnnnnnnnnnnnnnnnnnnnnnnnnnnnnnnnnnnnnnnnnnnnnnnnnnnnnnnnnnnnnnnnnnnnnnnnnnnnnnnnnnnnnnnnnnnnnnnnnnnnnnnnnnnnnnnnnnnnnnnnnnnnnnnnnnnnnnnnnnnnnnnataaaaataagtatttaatcttaaaataaagaaatgtttgtatatctttactctaaataatactatcacaaaaaaaatgaaaaagaaatgatcactcaataataaaataaggatatggtggtaaaacagtaaaataaataattattaccacataccaattatatttatcacattttttcttctgattttatgttctttccaactccatacaacccattttgaggtataagaaatggggtataagtatattagtactcaccactaaataacattacatttcgtacccgtcgaaataaattattaaaaaacaaaaccagaagcattatatgatgccaaaatcatcacattccaataaacattatgtaaatttaatcacactttcctgaagtttcaattacgttcaagaaactttaaagagtgttgaaatgaatcattcaaaagcagctgacaattgataaagatcctagacaaaaattggcccctaacttagaattatctcgcagtacagaaagaaccttcagacagtccattgccaatcaaatttgagttggacaccctccaagaatgggaaaaaaatataaagaaggatatcgattgggaacttgtcccctgcaacaaatttataaaaaacattaagaatatactttaaaataaatcatgattacgttttcaaaataaataatgtgaaggcccagaatccagtaattcgtagaatccatgatggtaatgatgccaattttagtatttatctgtatttgtgtagtttagaacatttatacccatgcctcaagcaagcataacaaggatcaagacaattaattaagttacccattgagaatatgaatatcgcatatcgaccactgcataattattatcttgtttttaaacataatgtattggcttgatatctactaataatttacacaatatgcaatattacaatctgctaaagaaattaaaaaatttggatagtttttaaaagaaatactatatacaaatacaaaaataaataatatttttattctataataccataaaaattgaatattaccagaatattatattagttagaataggataattttaaaatattaataattcaattagtcaaataaattatatataacaaattttattttttatctataaattatttttatttcataatggagatacaaactttttccaatgataaaaaatacatgtgcttaaaatcaaagtcaatcttaaaatgcatattttgaataaaatataatatcattaatatcattatattatttacctaagagtgattatttgaaatgaataaaaatacatttgtttgaatttaaaaatattctcaaaatatagaaatttcaaaattttatattaattattgtcttcaaattattttcttaatggtatctataattttaatgaattttttttaataaacaccataatgaattatgactttatataaacttttctttcaataataggaattcaagaattgttattttgaaaataactttatttgaccatcatccttaaaagaattagttttataatcatgcatttaaagatactttatcagaaataaaaataaaatctaccttgaaaatcatataaaaaaatatttcatattaaaatctccaacaatttagatataaaaaatttcaaataagtgttattatgggtaatgcctaataataagtacacaactccctaataataagtacacaacacaaatttcaaatatttgactagcatagagttcttgactattgacttagtttgacaaacaaattctaatctacaaattgatgtagtcaacaatcaaatgaaatccatgctccattcacacacacaaaaaaaataaaaaaatccatgctattgaaatgtttgagagcaaccttattttaataacacaatagttatggccttaacttgtagctgtgtggtaagtgataggaatcaactgcaaatcctgttttctttttactgacaagccaaaggattcagtcatatcaagttcctcaggcctatttccttgagccattttccagtcaaaatggaaaagcaaatttgcaagcgagaattcaacattaacaatgccaagattgatcccagggcatatcctccttccagctccaaatgggataaactcaaaatcaccacctttgtaatcaattgggctatcaaggaacctttcaggattaaatttctcagcctcaacccaatagttaggatccctcccaattgcccatgcattaacaatgactttgcttttggttggtatctcatacccattaatctcacatctctcactgcattcccttggaagcagcaatggagaaggtggatgtaaacgcaaagtttctttgataactgatctcaagtatttcagttcatgaatacttgtttcatccacatacccttttccatcaaagacccttcttacctcaatttgcactttctccatcaccctcgggttcttcactagttctgacattacccaaaccataattattgatgaagtgtcgcttccagcactgaagatgtcctgacagaaatgttaaggtgttagtattacatttctaatgagattaatcaataatcaccagaatttatcataaaacaaatttatcagtttaatttaatgtaagtcataatttaagtgtgaataacttaaaaccggcacttcagttcaaaacattagatcaatttcattacatcaacatcaacaacacctttaacccaagttaattggggtcggtggtggtagatgaatctaatgataaatcgtaaataagacagaaagagaaagggagaggggaagaaaaaaatggaaataagacaaaggagagaaaaaatggtgaaagaaagaagggagaaaagaactaaaacaaaggaataactggaacatagaactactaatgggtttaaccctccaccaagtttatagcttttctccactccgtcttaagacatattatccgctaatctatatctcactccattagatcttgtttaactaccttttcccaggtaagtttcgatccatctctacctctctttgtgtcgagttcttggtaacaaactcttgtttttatggaagcatctagtggttgtctcataacatgtccaaaccacctcaatctatactccctcatcttttcacataccggtaccactaatacctttcttcaaatatcctcatttcttatcttatccatcttcatatatccacacatccaccttaacatcctgatttttgctatccctatttcttatcaatattaagttcacccaggacagctcttgatgactgacgaggtagtctactaaatgactcagatttggaaattttgcacggttttctatttgtaaaatattaaacaagaagattgctttgatacactacactctttctaaggcactccttctatcgagtttggatcctctctggcctgttgagcaacaagcagcctttttgatatactttctataactagttaaaatttattaaaaattataagatcataaataagactaataaataagaaatatgacctacaaatatatgtaattttaataaatttcagtgaataaagagtgtgtttaaaatagtctactaaagaatttgttattaacatttctcttgtaaaagatgttcaagatcaatataatcaaaatcctattttgactggatcaaacaatcatcaattgagagaagaaaaaaatcatatctagaactatttgattggatataattatcttttccttttgcatagatttttaacaaacatactaaccaaaatggttgctttgacaacagtgtcagacagggggtgttggaggtcaccattcttctgaagccttaaaagaacatccactagatcttcccctttttcttcaccaccagcctttgtgtccaaacttttttctctgtgatccctaacaatgttctcaagtatcctatccattcctagatggatcttctcaattctagtcctaatcccagtaagaacttgtagaagtccaatggaaggatacaaatcagcaagagaaaaccctgtaactgtctcaatgacatccttcatatactctatataagcctgttggtctttggactttttaccaaaaacaatccgtgatagtaacccatatgccaatgaactaatcttctcactaatattaattggtgacccttcactcaaagatatctctttgacaaaaattgacaactcttgttccctgattgatctgaaggactggacacgcttttgtgctagtagttccatggtgcaaatctttctcatctgattcaaataagttccttgtgggctgaaggtcatgcccttagagccataagtgataacatcagcaggaagcacataaggcctatttgcaaagatgatatcatgtgtgttcatcactacttttgccatttcgggcgaagataccactatgcagcaaagctcaccaagctgcatatgcatgagagaaccatattgacttgccaatcttgctagggacctatgaggtagagttccaagatgatgtatgcttcctatgaggggtagcttccttggtcctggtggcaacttggagtttgaattctgggtctttgatctccaaagtgtgttgattagcatgaacactaagaggaagaaaggaaggattatagataaggaaatatgaagctccaaccccattcttataaatcaagattataaccttgaaaaagtatggtttggctgtgaagtaaagttgaggtttaaactacaaattcacagcttggtgctgaaatgaggaaatatagctggtactggcgcgggtgctgctgctttcttagcttatgagaaaatggactgatttttaattagaaattaacaaagatagtggttagaaaagtcgtcgtcaattaatatttcaaaaatggcggcaagcacgacttttggccatacgtttaattttcgatgctgaggtttatctatatagtcattagattagttcttcgaaatgaacagcggatattctcgaacacagattataatcttaattcttatgatactgtgtgtatatatttaagataaatgataatttgtaatataatagtttaaaatataatcattagaaaatgatttatttacttacttcttgaattagtattattgaacttaattgcttggttgaataattttttgtaaacattaaattttgggttagtttttttttaaactaaaacttagaaaacaaaatgattttaattaaattaattttgagctgttaagtgtaattaagatgcatgtacgtatttaaattgatcttaactacaaacttatcataaaacatgttttttattaaaaaaaagtatgaaaaaataattttaaatactaaaacaaataggagcatcatcgattcaatcaatgattgatagtccttgataaataaattaatgggaaaaaaaaacccatataatttgatcagaagtggtgtccatctgtgattccaatattgagtcaaagtgtctttgtcacatctcatggccagttaaaaatggatattctaaatgtaaagcatagcaattagcaacaccgatggcgatgttgcttcgctttgttcacggatctcaggatctgaattctgaactgcacagtcttcgggttatgcatgggaatgttatcagaagtccttgccttgacgttgaagaagttgaagctcttgctatttagatggatctcatagatctattctttgaatttgatagcaaactggttgtggacaaaatgattacttcatcccttatgcttctcaagagtggcgaaccttattggatgttggttttgtcagcctaatgatcaggcacatgttcttgggtggctctatctaggggtgctcatgataatgatataaaaaaaattaattataattataaaatacttttattataattataattattaatgcataaaatcagttataaaaatgtaataaaattaaaaaatcatttttttatttgagtttaaaagttaagtatcaacaattaaaataattttatactcttaattaattgattaaagatcataatataaacctatttatagtgttaatatattacctatcttctctttatttttaatataaaatcggttatataaacctatttatagtgttaatatactttgaaccccgtcgtatatcttgtaatatttacaaaattgtcaccgcctcacattctaagacggttttttaggaaccgtcttagaaggtgcgtcataaaagatccctttttcagtagtggttatgaatggacacccaaatatataaccagtttattaaaaacaatattttgttattttttattggtgaattcaatatttggttatactaaaccataaccagttatataaaattgattatgcttatggttatttaagtaaccaaaccctgaacaatcctagttccatcttattctagtctccatattttttaacaattaaattcttgtgtattgttcatttgattattttttttaaggatggccatttggttattaatgaaatgataaaaacttattttcataaaaaaaattctatataaatatttatattctttttcacttgcaaatctttgcaaatcaatgttatattgctgtatcacacttccattacaaatccaatgtgcaaactaatactatttttttaacatttagttttattccttatatttttcaaatagtaaactttaatccctatgttggaaaaaaagtgttaattttagggtacaaagtttaagtattttaaaaaataggctaaattagataggtgtggatgcaaatcttttttacctctttttttcttttaatttgatgaataatcatttttagggagatcatctgacgtctagaaactagttgaatagttacaattaaatgaaattgtttgtaattcgacactgaaggataattctttaagtgaatctctattggaagctccaacatgacacacactagcaccatgtccaatagtattggaagtgcctttccagtctatcatttttactatatttttttattttattagattcaattagtctcttatcttttaaagaaattaatttaatcctttatgtcttaaattaaggtaaattggtgttttcatcactttataattaataattaataatcctttcaggattagatttctcagcctcaatccaatagttaggatccctcccaatttcccatgcattaacaatgactttgcttttggttggtatctcatacccattaatctcacatctctcactgcattcccttggaagcaacaatggaagaggtggatgtaaacgtaaagtttctttgataactgatctcaagtatttcagttcatgaatacttgtttcatccacatatccttttatatcaaagacccttctcacctcaatttgcactttctccatcaccctcgggttcttcactagttctgacattacccaaatcataattgttgatgaagcgttgcttccagcactgaaaatgtcctggcagaaatgttggggcattaaactacattactaacgctttagataatcaccaagaattcatcatagaatcaaacttagtgcatgtttggaatacagttgcaaaccttttgaaaatacgttcacaagaaaagatgcaaaggatatccttcaccaaaagtactttcagagctctgtccaaggaaaatgaacagtactctgaacatagctttatcagttattcagtttagcttaatgtaaatcatagtccaagtgtgaataatttaaaaccagcgcttgagttcaaaatatttgatgaggatataactacatataaattaaaacaggacaactcttgatgatcataggagaaaggctattgagtgactcatgtggaattttgctaggttttctataggtaaaatataaaaaaagttgacaatattgtaaaaggtgttcaagaccaatattatcaatcctactttgacttgcatcaaatgatcatcaattgagaaaaaattaaagataatatctacaaaaatattgatctaatataattatcttcgcaaatttgcatagatttgtaacagaaacatactaacgttgctttgacaacactgtcagacatgggttggagggaggtctccattcttctgaagccttaaaagaacatcaactagatcttctccattttcttcaccaacagccttaaaagaatattcatccacataaatgacgtgcaacgatcgttaattacaacatcatcaaggtgtcatcacttaacaacacctaacaaattcaaggataaaaatgagtatttaatcttaaaataaagaaatgtttgtatatctttactttaaataatactatcacaaaaaaaaaatgaaaaagaaatgatcactcaataataaaataaggatatggtggtaaaacagtaaaataaataattattaccacataccaattatatttatcactctttttttctttctgattttatgttctttccacctccatactccccattttgaggtataagaaatggggtatatgtatattagtactcaccactaaataacattatatttcgtacccgtcgaaataaattattaaaaaacaaaactagaagcattatatgatgccaaaatcatcacattccaataaacattatgtaaatttaatcacactttcctgaagtttcaattacgttcaagaaactttaaagagtgtgaaatgaatcattcaaaagcagctgacaattgataaagatcctagacaaaaattggcccctaacttaattatctcgcagtacagaaagaaccttcagacagtccattgccaatcaaatttgagttggacatcctccaagaatgggaaaaaatacaaggaaggatatcgattgggaacttgtcccctgcaacaaatttataaaaacattaagaatatactttaatataaatcatgattacgttttcaaaataaataatgatgaaggcccagaatccactaattcgtagcatccatgctggtaatgatgccaattttagtatttaactgtatttgtgtagtttagaacatttatacccatgcctcaaacaagcataacaaggatcaagacaattaagttacccattgagaatatgaatatagcatatcgaccactgcataattattatcttgtttttaaccataatgtattggcttgacatctactaataatttacacaatatgcaatattacaatccgccaaagaaattaaaaaatgtggcacccaagtaaacacacaaatgaaagttatatatacattctttctcaggaaaaccatgaagcatgaaaaaaaccttgtgaaactgaaatccataccaaatcttggttagagttagaacgaagtcaagtgtatcattaaaccttcaaaactcatttacatgaagcattaagatactctgaaacctgattaactattgtaattggtaacaattacatttgaggctaggaccatataaaccttatggcccttgtaaagaactggggcattgaaaatttcacgttttgactcagaatttgcctgatcagatggaacgggtattgaggcaagcactttctgagaataccaccacttaatttggtctagaagccagacttctattctggtaccaatacaatgtatacacatcctgttctcaagtcaatcttgtagtatgttgagactttgccatttcccttaagacagcaccaacaattgctgcctgctcaaggcagtctgccttacatctaaaagaacaacacatgttttgctatatatacgacaaccttaaagtcgagtttcctcaaaaagtatatatgcatccattgccttattggcattacttaatccttctatcatagcattataatacatagaatcaggtatgcccccacttgacttaaatctcttaaagaggtcttttgcctctagaacgtttccaacccttgcaagtcctgaaatcatggtgatgtatgtgatagtattgggttttaacccttgtttctgcatttcttgccagaatacaaaggccttattaaattttctgatcttacaaagaccatttactataatgctgtaagttacttcattgggagggcatttcaagtttttcatgttctggaagcagacaagagcttcatcaatttcctcagctttcactaatgcatctagtaagcaattccatgtgtatgtatttggagtcagacctttctgcatcaactcctccaaaattaaatatgcttcatcaatccttcccaccttccaaaacccatcaataagactactatagaccacaacattcaaatcaacaccttttgattttgcttcttcaaataacatatatgcttcatccagcctgtcaattttggcaagtccatcaatgacagaaccataaatcacaacagtaggttggagaccctttgtcttcatttcctccagtagttggtaagctttgttgaccttacaagacttgcagaatccatcaataactatgttgtaagcacgggtgtccaaatgcagtccttgttccttcatctcataaaacaacttgtatggttctttagagaaacctgctttcacaagaccatgaactaaaattgaatagctccaagcatcaggaattaaaccctgagcctttatttcttcaaataaagccctacctttctcaatttccccagctttgtaaacacaatccatgtaattattaaggagcatcagatcaggagaaaacccctatgcatcatctctttatagattttgtgaccatcttccttcctaccacacttgaagaagttcctaataagggatgtatacaccactgcatttggagtttgaccagaatctaacatcttttcataaagcatataggaatcattcaccctgccgtgtcttcccaagccatcaatgagtgaacaaaatgttactgtgtcaggggtgcaaactttatgatccaatcctaaaaatatggagcaagcttcatcaagtttttgagctttacacagtcgatcaatcataatatttacatccatgatattagggaataagccagcctctttcatggagtcctgaactttcagagcagcttcaagttctcctgccttacaaagcatgtcaattaaaatattgtaggatgtaagattgggagcttcatctattttcatttcttcaaggattctcagtgcttcctcaacttttccctttcttccaaggcaagtcaggatgcaattatatgcaattacactaggtatacatccctttctcttttgcctctcaagtaagctgtatgcttcatcaaatttcccaactgagccataacccattatcatggtattataagcgtaaacacaaggaacgctcgtgttgctatcaagttcttcaaacaactctacagcttcatccaccctctcagccttgcaaagaacccctattatgctagttacatcatgtcgtcgggcacccactcttgtgatttcaattcatgaaagaatttccaggccatatccaccttaccaacatttccaaaacagtctatacatacattatagaggacaaggtcagcattaaacaagttactcttcatcttatccagcaaggatagagcagcatcaacacggccctcccttgcaaacacacgaatatgcgtggtaaacaaatgcacacttacttcataacctatttcctgcatttgacgcaagagagtgagcatgggatcagcttcatgagctgcagagagagcaccaatcagcgtcgtataagctgaataagcagggggaaacttgaacttcctcattgtttcaataactccaaaagcttcccctagcttccgcaacttgacaaaactagcaaccattttgatacaagtattattagagggtccaaatccagccatactcagctcttcaagaatctattccaagtactccaaatttctggtcctcgccataagcatgagaagtgcattgtaggcttcagggcaacggttgttcagttttcctctccacccacctaaaataatgcaatgccaccctcacatccttcaatctcctgatcactccaacaaccaactctggttgaggcatttcatcaaaggtgttgaaggcatcctcaagggcaggtccccaaggatatgtgtccaacacccggcagatatcgtgcactgtctttctcatgccctccgatttgaatgcattgtcttgggaatgggaggcatcatccataaaggaattaactttaactttcccatacatttcaggcggagacccatttgaaaaagacgatgaaaacttgcagggcaaagggtttattttcccacatttgaaaacagatcgtaacttcagaactgcaaccaaaattaaaagatgaaaatcagattacaaattgcaaccgtgaaacgggtatatgataataagaatgcaattattttaaggaggaaaaacaaaaaagaagactttgtgcccttgagagaatcttcatgtgctcacaacacacgcacacactataaaatcagaaatggagagagattaacaaaaaaaaagtgaagagaacacagagtaaagcaagagcgagagccaagaacaaggagaagctcgtactgttgtattttatttgtaacgtggtttttctttttttcttttttcttttttcctttttctatcaacatcaacatcacctatatttcgagatataagaaattttaaaaaactattaaaatgagtttttttaaatctttataaagcattttttatactaacacgtttagtacatgttacaatgcggtgtttaattttaggaaaatagttctcttgcatccttcacatatattttaagttcaagaggaataaaagaaaagagatgggaatgatttttatttagtgaaaatttttaatggtaagagaaggaaaaataaaaaggttgattttcatttttttcccctctgttctggtatatttnnnnnnnnnnnnnnnnnnnnnnnnnnnnnnnnnnnnnnnnnnnnnnnnnnnnnnnnnnnnnnnnnnnnnnnnnnnnnnnnnnnnnnnnnnnnnnnnnnnnnnnnnnnnnnnnnnnnnnnnnnnnnnnnnnnnnnnnnnnnnnnnnnnnnnnnnnnnnnnnnnnnnnnnnnnnnnnnnnnnnnnnnnnnnnnnnnnnnnnnnnnnnnnnnnnnnnnnnnnnnnnnnnnnnnnnnnnnnnnnnnnnnnnnnnnnnnnnnnnnnnnnnnnnnnnnnnnnnnnnnnnnnnnnnnnnnnnnnnnnnnnnnnnnnnnnnnnnnnnnnnnnnnnnnnnnnnnnnnnnnnnnnnnnnnnnnnnnnnnnnnnnnnnnnnnnnnnnnnnnnnnnnnnnnnnnnnnnnnnnnnnnnnnnnnnnnnnnnnnnnnnnnnnnnnnnnnnnnnnnnnnnnnnnnnnnnnnnnnnnnnnnnnnnnnnnnnnnnnnnnnnnnnnnnnnnnnnnnnnnnnnnnnnnnnnnnnnnnnnnnnnnnnnnnnnnnnnnnnnnnnnnnnnnnnnnnnnnnnnnnnnnnnnnnnnnnnnnnnnnnnnnnnnnnnnnnnnnnnnnnnnnnnnnnnnnnnnnnnnnnnnnnnnnnnnnnnnnnnnnnnnnnnnnnnnnnnnnnnnnnnnnnnnnnnnnnnntaatggtttttacactctaaatctcgctcaaacaataactttattatacttttgttctttccactatgttaatttgatgaattcaatctccatttttttcacaaatttaatctcgctcacacaatttttttcacaaatataaaaccactctattgtcaaaactaactgtcaacacagattgtggcatagtatttcaactgtacataaaacccctctcttacacagattgattcctaaagttgtcaacttgctagcaagtacgcctgtcgaagttgtcaatttactaacaaagttaatctaactatagaccaatttatattcatataaagcttgaaaagtcaaaacaaaacaagtaacatctttcatcaatcaaattgtatatatttgatgttttgttaagcattttctagccaaaatcaaccaaatgaagaaatttgcggaaataacttgcaacaatctaattaacttcaaatattttttggtaatgaaaaccaaagttgtgaaagtacaataactaaatatcacagccattgcactcatcaagtttcatactcaaacaccaaatattttttggaacgattgttactcttccataacatctccctcaattacttccaccttctccttcaacggggtaatctttgttaagaggacctctgcaatggagaatgtctattagtacagtatgtaaataatttctataaagnnnnnnnnnnnnnnnnnnnnnnnnnnnnnnnnnnnnnnnnnnnnnnnnnnnnnnnnnnnnnnnnnnnnnnnnnnnnnnnnnnnnnnnnnnnnnnnnnnnnnnnnnnnnnnnnnnnnnnnnnnnnnnnnnnnnnnnnnnnnnnnnnnnnnnnnnnnnnnnnnnnnnnnnnnnnnnnnnnnnnnnnnnnnnnnnnnnnnnnnnnnnnnnnnnnnnnnnnnnnnnnnnnnnnnnnnnnnnnnnnnnnnnnnnnnnnnnnnnnnnnnnnnnnnnnnnnnnnnnnnnnnnnnnnnnnnnnnnnnnnnnnnnnnnnnnnnnnnnnnnnnnnnnnnnnnnnnnnnnnnnnnnnnnnnnnnnnnnnnnnnnnnnnnnnnnnnnnnnnnnnnnnnnnnnnnnnnnnnnnnnnnnnnnnnnnnnnnnnnnnnnnnnnnnnnnnnnnnnnnnnnnnnnnnnnnnnnnnnnnnnnnnnnnnnnnnnnnnnnnnnnnnnnnnnnnnnnnnnnnnnnnnnnnnnnnnnnnnnnnnnnnctagaattaaaaaaaaaaaaaggaaacaggagatatgggcagacacagaaagggcaggtcattaaatgtttaattattttctcaagccctcaataggaattctgctttatataaaaatgtcatggatgtatattatctaggaaaaattatacaaagactcctcaacttaggattatgtgcaatttgcctgcttgtgcttcgaattgaagcaatcaaaccctaaattgtaagactgcataagtaaacccttaataactattaatttaaatagttaacggaattgtgtatatgacatgcatcatgcatggtaaggtgcatacagcctctactatatgtagccttgtgtatttgtgattttgtgtaacattgtgttaaacaacaacaataataagtggagtagatttgttataggaacttcaaaaggaaagagataatcatatttgtgtttcatggattgggtctttaagacccaaaactcatccacacagtaacacacaaccctcagttaatagagcactcatctcaacccttaattattagagcactcatctcaacccttagttaataagtactcatctaacatattctttaatcagaaaaacatgaacgtcaaattgacaactctgtctgataggatattgatagtaatattctgtgctgttagtaatattctattttagttagttagttggggaggggtcagaaattataaataggaggggggtggctgagcataagacagcttgtaagcaaggcaatagtaggaggctgtgattcctcgaattatcacaattgtgttgcaggagattattctccaattcaataacagatccattctttacaatctttcttttttaaatctgaaccaggttcctaacactggtatcagagctcctttcttggggctgtgaggagtgaatgggttcgaaaaccaacagcaagatggaggcgaggctggaggcacttgaacacacaatggaagagacccgtgaggctatggagcagaatagcgcaactatggaggccaatcgagttgcgattgaaacctgtttgggctcgattgaattgctgctgcagaagctggcagcgaccttggagaggccgttgatggaggaaccggttcaggcgaagagggagaaagaaagaaacaaggaagaaggcgaagaggtggcgcaaccatggaggcacatcgaaatgctgattttcacgggtaggggtgttcacatgtacgggtcacccgtgaaccgaaccgatctgaacagtttgggttgggtcatttatatatttgggtcaaaaccgaaccgatcaaaatcgtttatgtacgggttgggtcacgggtttagatttacagatccgttgatccgatgacccgatccgtgaactcgtaataataatataaattctattatttatatatatatataaatattaaaaattaaaaaaataatttgacaataaaaaagatataatattgtaaatgtttaagattgcattcaaaaataagataggatattttttaatattgcattaaaaaaaaggatagaatatttttaagatttcattgcataatataatagaatatttttaagattgcattggataatatgatagaatatatttaggattacattcaaaaattggttaaaatcatatatttaaattagtataaatagaaacatattttggtgttcatgtatgcattccattccaaataatattagagagtttatgtttgcatcattgagagaattgttgtgagatcatatagaagcgtttgacaagtttgattcttcaactctcaatcaggatttaaaggtacctatttgcttaaggaatataagcgtaaatgtaactattttattgtattcttcttcttgactttggaaaaggtcgcagctcggaactaggataccagttttgtctctgttcttgatgaattgagacatgcgacttctggctgggaaattaggataccagtctggttgggaaacaaggatatcaatctatctctattcttggtgaattgagactagagctttttgctgggaaacaaggataccagttgggataattgttgtataagggtagactaggaaacttgattatgttgatggtattaaatgaatcaattttactactttcatacatttgataatattgtgttaattgtatgagatatttgaaagaatcgtgatataaaatagtagttctaaaaaaaaaaattaaataggtaacccgatgatccgaaccgaatcaaactgttcatgaacgggatgggatgggttgggtttcaaattttttttcttctaaaaatcgaaccgaaccgatcaaatttgattgggttgggtcctaaatttggccaaaaccaatccgaaccgacccgcgaacacccctattcacgggggaggacccagtgggctaggtatcgcggatagagagatatttccggctccaggcagtgagggaggagaagttaggcgcgattctggtggccatgaatggagaagctctagcttggttccagtggtgggaatcttggagttcttcccaatcttgggaggggttcaaactggccttggttcagaggtttcaaggtatgagtgtggcaaccccttttcaagctttgttagcattaagacaagatgatagtgtgcagagctacattggtcagtttgaaaaacatgtgggggctggaaaagggttgggagaacctttcttgatggaagttttcttgaaggggttaaaggaggaaattgggatagaaataaggttgcatgagcccaaaaccttgctggatactatgatgaaggcaagacaagtggaggaaaaaaataaggtgttgcgaaatctaccaagactaagtaaagagcctcaaacttttctgaaacccagtttcttgggttcaagaaatgggaaggaagggaagccccttaatagtaaggatagtgaatctatccaaactattagtgcagaggaaaatggctggtaaggtagaagaacactccacaaattgtcaccagcaacagtgaatgagaaaatgaggaagggagagtgttttacacgtgaagaaaagtatcatctaacacatgtgtgcaagaacaaatagctgaggttgatgattatggaagaagaagatgaaggagaccctggctgaataatacatgctgtttgcttcacctggaccttggggacaaggtccatcttgaaggggagggtattgataggatattgatagtaatattctgttttagttagttagtagttggggaggggtcaaaaattataaataggaggggggtggctgagcataaggcagcttgtaagcaaggaaatagtaggaggctgtgattcctcgaattatcacaattgtgttgcaggagattattctccaattcaataaaagatccattcttttcaatctttcttttctaaatctgaaccaggttcctaacactgtcaaacgtcaattatttaatcatatagcaacaagttgaaaggggcttgtctaacttgagctattatctaagtttgatacttcacaacaccaaattcccaagattatcatatttgtcacaaggtgagatactatgtcatgctagactacaaactattgacggttgacacacaatactaagcaaaacaatatagttttattgcaatctcaagtatattaaattagcaaaaatcgcaactaacctgtctttttggggaaatcaaagccttttggatttacataggtacgaggatttggtagaaggtggttcctgagatattccttgtgtccctgtgaagcattgatgaagaaattgtgcagaaattagagttagatgactctcatcaaagaacaacctgcacaattgagcatcaaagcactcaccttggttatcacacaaacatcaacattacttccacttcctaggtcattaaatattccagcgcatatcgcctcaacaactatcttaatgccttcatccctctacaccaaatcaaaatgtttatatcaaattaaaatctctatcaaaatgcagcatttcaacatgataaaaagttacaaacaccaccagtatcaattataacatatataatgcacaatttttacatttagatttgaaattgacatatttgcttcatattgttccattgaaattattataaattgaacagctttgacagaatattatcaaatcagtgttatcaatggtggaaggcaacaattctgccatataagcatgccattgtggtctatggcacagccaagcaggcctcccttcacaaatagtaggcagttggcaaaacccatcacgccatggcacctccatttaacaacaatgtatcaaatgcactcctctaagggtgaatttcctcaaaaatactctaacgtagagctttactgacgtgtgaggctgtgagccttaaattcttacttacactcaaactttccttgtacttggactcaaatacagacattgcagcaagtgaacctgatcccattgtagcaaatgggagggtgtcagttgacccatgaggataaatctgcaaaacaagtcatgagaaattgagctataggcatccaaaacaaggaaacttgagcataaaagaaaagttttaagcaatgaactaacagtatgcaaatgaggtccagtgatatcaaccccaccaagcaccaaagcagctgagacatgcccttgataactgcacaatagtttaaaagagtcagattcagtggttgatacagagagaaattcaattgatgagaaagttctgaaactcaacttgaaaaggtgtttcttaagaagggtcagcgccgtaacaactcttgattctcgaccagtatggtagcgatgtaattgcagctgtgagctaaccatgtctacagtaaataacaaacttctcattttcaacaattttactacatcaataataacaagagcaaaagctaaagttgtggtccatatgcaactatccataaggcataacgtaaaaatgtgtaacaagaaaaatgcattttaaacaaatacctgttacagcctctgtatcagcagctgtgcctgctccacagcaatatatgttgggtgccatataatgaattttctcacagttcttatcagccactataggtccttcagttgccctagtatcagcaccaagaatgacaccatcctgaggcagatttattaagtgggaaagttcagctttagattacaatatacaaattaaacattaaaaataaatatgcaatcaacatatgaagtcataaaactttgtttggaatagataatattgccatgaaaagtctcattaacagcacaaataccaaatgttacaattcccagttagtggactgtttcacaagaaagcagtctgtactctgtagcaaagcaacttggtttcaaatttatgatacaaaatcttcatattaaacctcagctgtaacattagaatcacaaccgcattgattgttccccagctagatggaacaatgtagacaagaaaaaaagctcaaccatgctcaatatccaccgttgaggtcaatatgattagcagttattgaagtagccacttatatattgcaaaatttataaatccatgcaggagctttatgactttatttcttgccaactgtttctaaagtaaaatcatccatatactttataacaaaaattaacattttacttaaaatattttagcataaaaaatcaatcaaatttctcagagaaaagagagagtagtaatagactaatagtactactttacagatagaaattgagttcaaaaacagtcacgtagattttcaaaacatacaagtcaagatatccagagccagactaggcttcccatattctcttgctataaaacaatgcacaatttcagaaccaactatttccctaacataaaaataaataaagaaaaattcaacattcacaacctaagcaaatataacacccaactcaaccaaacttatagcatttacataaggtgaatttccttcacccgcacagcgaaacctcacaaggccagacatctatctaccaaaacaaatgatctaattcattcgagattccaagccgaaccataacttcacatcctgcgtctggatccattattccattggaacccactcacaattacggtatgaaaaaatcacaataaagaagcaaagaaaaaagagtgaagataaacacgtagaaaaacaaataaaaacacagcgatgtttacatatatgataataagataaaattaggttaaatagacatgaaaagagcgagggaatgatttcagacctggaaaactaaaccgacaatagtggtgccagttttgagaaaggttggggctttgaggcccttgttttgaagcattgcgtttcttcggcatagatcaaaactgaagccacccttgggaggaagatccaacgacggagacatattcaatggaccctgcaaaacatatagaatgagaagtttgacggtgggatcggaaagaaagggagctccaaaaacctagctagggttttgaatacataatgagaagagagaaagagaaagtaagataattaaaaataataataaaacgatacgaaaggatagtcacagtgacagagaaggggggttgaggttgaagttcttgatcttgattcttgagccccgtatgcaaagaaagagctcactttgaagtttgaaggaagcaaagttcttcaaatttgggtcccttctttcttcgatacaaatgattatgaatccccctcaattacttgcacaatgggtcacgtgacaagtttatacaaattgcaaatcactccttctatattttgcaagaaaatatctcaagtctcaacaaataattattttaaagtgctaaattcataaataaatagaaaactgatcacataaaaaaaatgttaaattgacccgcaggtctcatttttattttttttactaaatttttaactaggtctctgaatttttttttcattagactcatattagtaattttttttttacaaataattgataaaaattaaacgttatttttaatagttnnnnnnnnnnnnnnnnnnnnnnnnnnnnnnnnnnnnnnnnnnnnnnnnnnnnnnnnnnnnnnnnnnnnnnnnnnnnnnnnnnnnnnnnnnnnnnnnnnnnnnnnnnnnnnnnnnnnnnnnnnnnnnnnnnnnnnnnnnnnnnnnnnnnnnnnnnnnnnnnnnnnnnnnnnnnnnnnnnnnnnnnnnnnnnnnnnnnnnnnnnnnnnnnnnnnnnnnnnnnnnnnnnnnnnnnnnnnnnnnnnnnnnnnnnnnnnnnnnnnnnnnnnnnnnnnnnnnnnnnnnnnnnnnnnnnnnnnnnnnnnnnnnnnnnnnnnnnnnnnnnnnnnnnnnnnnnnnnnnnnnnnnnnnnnnnnnnnnnnnnnnnnnnnnnnnnnnnnnnnnnnnnnnnnnnnnnnnnnnnnnnnnnnnnnnnnnnnnnnnnnnnnnnnnnnnnnnnnnnnnnnnnnnnnnnnnnnnnnnnnnnnnnnnnnnnnnnnnnnnnnnnnnatttaaaaaaaaatcctcatttcttatacatttttatttatttatttatttatattattcgcgtcatttaatatacatttgttttctttccttccacttaagtatacaatcaaacaacctataaaaccatccattttccattcattctttttccttttattttttcctaaataaatatactttttgaagaaataccatagtaggtataaaatcatattttctgaaaacagtgcacatttggttaataacataaacatgaaggatcttgtagcattgtgtaccaattgttcataccagtgttcgtagctgtgattaagttaatacaagaatattcatattatcttaaccatttgtatttgtcctgcaacattcagaatttctattagccattttgttgcttgtttatcatgttccgtcatgaaattggctttcataggatgacaagctttttatgcagtacattcccctaaagactagcagttagaaactttggccttccaatgcggcgagtctgtaccccaaccatgtccatctgttacttgtccaaataccatgcacttgcatacaccatcaaatccttttaccaaacatagtgaaagccaaaattgccccaggaagggactaagtcaaaattgtgttacttcaaaaaaattgaaaaatttgtgttaattttatatctgtttcagtgttgttcatatatcttccttcaaattttggatgcttagcaatttaataacttccccacaagaacttcatctttaaaattagaacaacgtgaaataagcttgtgcattgtctattagtctatgcttttaatttgaagagcttctgctcttgcttaagaggacatgttagattacaaacactatgataaaccaacacataaaagtataggtctaaaagagtaattcctttgttctacctctgaaaaaatacctcagaccacgataactagaaataaaaacaacttagcagggataagaatttgatgttgcctaagctcttgcaaagatggtttgatgttgatgattgaaagaactggcttttcttattcttataacacccagtcttggacttttatattaaaaaaaatggaaatttgaacaatctgaaaattataaattccaaacgagtgctcaaacagagaacagcactggatgcacgactgaaaaggctatcagcactacccttgttaacattaacgtgcataacatccaatatatatcttcatggcctacaatcgatctacattaattttattaaactactgcccagtgagattaccactcacacattaatctccaacaaggaaaagcaaaataacaagaagaagaatagataatgaaagtaatgaaaaccgaaattcatatacagcaacttacaacaacacaatcatacatacacaaatacagcttctgtaaatacccaacaataacatcatgtaatattatcaaggggtcctgttaggctgttactattattttcgcttttattatcgttagcaggagaacatgaattctctattactcacaaacaagaacagcaccagtagccaccagagttggcctagtggttaagagatttgagtagtctacatgaagtcctaggttcaaatctcattgctgctattgtacacactcaaatagtaaaaaagaacagccccaatcaaaaatcaaaatcacttcacctaaaatcctaaacacaaaactctaaagcatacatgcttgaggattattacattacactacactctaaagtctaaatacaataatcataaaagtcagcaatatgggaagtatggtccatggtgaagctatgaatcttatccaactcaacagggttgttcttccctcctaccagcttagccgggttcccgacaacagtagtccttggaggaacatccttaataaccgcagaaccagcaccaatcttagccccatcaccaaccttaatattccccaagatacaagttccagcaccaatcagcaccctatcaccaatctttgggtgcctgtccccagaaaccttaccagtccctcccaaagtgacactatgcagaattgaaacattgttccctatcacagcagtctctcccaccacaatcccagtcgcatgatccaacaaaatcccacttctaatcctagcccccggatgaacatccactgcgaaaacctgggaaacccggttctgaatcatcatagcaagaatcttccttccctgaagccatagcttgtgagccaccctgtgagcctggcacgccagaaagcctttgaagttcaagaagcaatgcacgtggcttatgcaagcagggtctctctccttcaccgctctcagatcactcttcacagcatccatgatggatttatcggtctccaaaaccgtcacaaaaagatcataaagtgtgctgcttgggaggcttgagttgctgagtttgatggcaaggtgattggccaacacggtttgcagtgagttgtgagagagaatggaagtgttgtagtaataagacaaaatgggttccacagtgacatcgagtttggcttcttcctgcatcttcgtccacaacacatccagttcaacgacctcatccgcttcaacatgttgtacggtggaaccagtgtgcaaggtgtttaccctgttgtgattgaaactggttttgaaggttttggagtgattatggttttctgtgacttgttttgatgatggagtcagaagggtgtgagtgtgaggatgaattcttgggttgttgttgttgttgtcgtcgccaacaaagaagagggacccttgttttggagatgtagtcacaagggaatgccttctcatcatggttttgttttcaggagaagatttggaaggaatgatatgtgatatgtgcccctaatctaagggaagaaacgttgaaggttatggagatccaagagaccagattccaattacactatctatttttttaaagagaaaaaatgcatgcaccatcattatataaggtgaatgaaacgttttatcattgattatggattgtcaaagatacagtttttgtttgtccctaccaataactaataatatctttgtatgcaccatatattaacaaaatttatattttataagtttaacaaataaatattcttaaacatataataaataacttaaattatgacaaagttttttaaatgttgataattgaattaattatttaaatttaatttagacaccaagataagaagaaaaaaattacacctaaaaagatgaaatacagacgaaaggctaaaaaaagtaatttgagatagttggaagaaatttttattattatttgagcaatgctgtaaatgcaagtctaaaggacaaagaaagttaatattaaaaaaattaattaattggtaaaaaaattaattaagaaagtgagagtgattaaaagtcctacctctaagttatgtattataatatataatataataatatatttatctagtaactattatttcgttttaataatatatatataattaaattcttaaagtattcttctatgaataattataaattaggtatgcatattacaactatagttttaagttttcttaattaatctccgttttgattatttcaaaaaaaaaattacagaagtttaaaaactccaatgtaatgtgtatgatatacgtattaactgttatattatttttttccttgacaacaattataactataaaatattttgtgtattataagaatacgtctaaatttaattcaattttcaaaatataaactaaaaattatttaagagaaatatttaacattatgaaaaagtataaatgcaattcatgtagattaatctttgaaacacgtaataaaatatgaaagattataaaaaaaaagtaagtatgaataactttcaaaaattaaatttagaaacacaaaattacgtgtcaatattttgtaaggaattgtacaaagagactaaattagtaaattattcttagaagaatatagtacacacaaaagtaattaatttgagaatataggtattagagagtaagaaataaaaataatatcttaaaaagttaatattaaataaagttaaaaatatatttgacgtataaaaaaggggggaaatacataaattaaactgattaatttttatttttttggaaagcataaaataatttcaaaaaattacatgcattaagaataaaaacaatataataaatttatttcactctaagaaattatttgattttataaaggtgaattatttaattatatgttgaaagtcttagaacctgccagttttgtaaaaggaaaagtccaactttggtttcattgagtcaaattgtttcaaaatatacattaccacccaattcccatccctcgtcattcctattcccatgtaacccatgacatcaccattatcatagcttcaacatattcatgctccttgggcttagccacctccaatatatacatattaaagagtatataaactactctataatctatatttataacattttattatttgattagcggtgattttaacatacacgagagaatgaatgttttttgtaattaatatctattatcaatgtagataaaaatgaaaatttatagatactaacgagtggttgatttaagtagtatatgcttaatttttaaggtcccgaaatttgagttttacatgtgaaannnnnnnnnnnnnnnnnnnnnnnnnnnnnnnnnnnnnnnnnnnnnnnnnnnnnnnnnnnnnnnnnnnnnnnnnnnnnnnnnnnnnnnnnnnnnnnnnnnnnnnnnnnnnnnnnnnnnnnnnnnnnnnnnnnnnnnnnnnnnnnnnnnnnnnnnnnnnnnnnnnnnnnnnnnnnnnnnnnnnnnnnnnnnnnnnnnnnnnnnnnnnnnnnnnnnnnnnnnnnnnnnnnnnnnnnnnnnnnnnnnnnnnnnnnnnnnnnnnnnnnnnnnnnnnnnnnnnnnnnnnnnnnnnnnnnnnnnnnnnnnnnnnnnnnnnnnnnnnnnnnnnnnnnnnnnnnnnnnnnnnnnnnnnnnnnnnnnnnnnnnnnnnnnnnnnnnnnnnnnnnnnnnnnnnnnnnnnnnnnnnnnnnnnnnnnnnnnnnnnnnnnnnnnnnnnnnnnnnnnnnnnnnnnnnnnnnnnnnnnnnnnnnnnnnnnnnnnnnnnnnnnnnnnnnnnnnnnnnnnnnnnnnnnnnnnnnnnnnnnnnnnnnnnnnnnnnnnnnnnnnnnnnnnnnnnnnnnnnnnnnnnnnnnnnnnntacctatagtatagggaaaaaaggtgaaagatcacgagatttatttccaaaacagtaaaaaggaaaatattgtagtgctagagaattatggattgcgaatattgtcgtctctaaatagatattaacactaaagagaaaattacagcgacgtcttataatttcttgaaaccgcataaaacatttatatgtttttaaccattattacaatagtttatgttaattatatgaaatacattatattgacactgtgattttctaaaataaaaaaatatttacactatgataaaatcataaattattaaataatttgtgttaaaatgactatatataattttatactacaagttcattatcattagactcttaaaaatattagatgttagtgtaatttgtcgtactattaaatatgtataggcatattaaagagtttaatgtttatgtattggaaaatagttttattaatatttaattatgaattatcgttaaattattttaaaataattattttaaaaattaataaatttatcataaattgaataattattcaaatttttttactaaatttttaatgtataactcttttttctatattaaatgtagtcaaatattttcactatttattatgtctggcaatatccattttatatcatgtatatcttgtcccgtgcgagtctttattctttgtttaagttgtttttgtatcatatggcacataattaaactgtttacaaaaaagggtatctttcgtgtatggttgatatctaagctcttcgaaaataggcatgccaatggagcgggatgggggtgggtattgcatttctcgttcctgtcctcgcccccaaatccgctctccgtccccatcctgatctccgtcgggttttaaaacctatctccatctccaccctcgtcgggggtcgggtttttcccgtccagtcttatccccgctatttgattaaaatttaaaaaataaaaaaaattatataactttttttattgaaaaatcggaccaaaaagttaattacttaacaaaaaaataataataacaaacccacatttaaaatatgagatcataatttaaaagttacaaaacaaaatcaatcaattcaattaaaaaataaaaaaataatatattttttattatttaatattatttattacgaggcgagggcggggatgggggcggggcgggtatcagtaatctcatacccgcccctgcccctgcttttggctatcaggaaaaacctaaacccgaatcggaacccaaaaaatttgattttttctcattaaaattgggacagactcgttcgggtacccacggattcaggtccaactgccatgcctattcgaaaatattttaaaaaaaaaaacttgtgtattctaaagctaactgtattattgacattgtaaagtaaaggacctaaaaaaatttcttttagaccaaacatggcagtcgagacacacttgtcttgttcctacacggctggtttattaaaaagtttgattgcacttctatttctcatattttaatttacttgagattttaacttttagttgtaattatttgtgtttagtttatttttagtttttaaaatgaattatatttaataattaaaaaacataatataaaagtgactttagttagcatttgaggaaaaaattcatcagaaactattaaaataagttattttaccaaatacatgctttttgcctaaagaaactttttatctagtaaaataaactctgaactaagtgaaaaatgttgccaaacacattatgaattttatggcatgcgaaaattatatactcttcttattattggaaaggggcaaacaagtgccggtctagagaaagacgtattcttatatcagcatttcatgcctagccaagtaaatctgatttctgcattattgaagatgttgaaccagtaaccaccaaaactgtgcatatttgatcatgttgattgttgtgtaatatggttactccatgtctcgaataaatcccaaaatctatatatgcccaatatttaaagttactatccagttaaaaagccttgatagaggataaaaaaaattcaagaaaatagaggttctacttcaagattaaaaaaataaaaaattcttgaaagaaagcttatgtagccaggagagcaaaagatagtcaaataaattcaagaaaatagtgctccagcaataactgaggtgcagaatgtattagggagaccccactaggaacaatagccagtattcaccaaaatatattggcaaataacagttcttttctaaactaagcataaagaacagcatcgtgcataactttcaaaccaattaaataactgtacaacaaatcagaattaaatatataactgtatatggtatacttataatatatctgttaatgacaaaaggccaggaaaaaaaagattcatttgcagtgaaatatacaatattataatttctgttaatgatttgtatttcttgactgctactatgtcaaagctcaatttcaattgaaggaaacaacaagaacataagtagagaagggaaagggagaacgctcaaacttttcttttcttggcttatatgcaaattcactagtacgtgagtatttctatattgtacaaggcacctcttggtacagtatacatacattcaaacaacacaactcctaaaaactagatggtattaaatgcaagatacatgaataagaaaaatactatgaacatgaagaatcaagatacatgcatgaacaaagtagatgaatcaagtttaattaattaatttagtagttccattttccaagatcaatatggttaagaacctgaaatgggggatatgcttacagcttgtcaatataatttttatataaagttcttagatatagagtcaaagtattcttttatagtaaatatattaagtgattatatttaaattaacttttcatatcaaaattcaatttcttgcacgggaaaatctagacgaaaaaaaaaaagtcaatgtgtgaatgctttctcctccattgagccctagctcctgttgttaataatctgatgacaatttgtttactggattcctttacacaaaacccccagtctatccagttggaaaatatttactgaaacttgtggctaagaaggtcgttctcttattatatagtattagatatattgaaaattaagagtgatgataagtgaacatcttcacatagtatacactttattactttaattaatactctatgtctttctttgtatcatatcacatatatacatcattttctcttctctctttctatataggtgttaagtaaagattggaaaacactaacctttttcctataacaacaatagatgaaatttgcaggagttggatgtgggatgagtccaaggacgtctccattgggatttttacatgggttctaatctaaataagaacaatgtttatttgggagcaactattaggcacaaagcttgtttaagcatcactgcttaacaccgttagtgcaatatggatcttcttctgcatcttcatcaaaattttctctttagttaaaatcaaaaccagtcactatattctctcttatttaattgttgtacaatgatcaatgaagggctgagatgctgcaagctagaggggaatttgggccagagagaatctagactccttgctggagaaatcattatgtggtcttagagtataccttgtcaatggtctcgaattaatctttatgtcacacatgtttaaatttttaacttatatatgaaaaaaaaaattaataacattggttgaaagtcatagagattggttaaactatatttgagtcataaaaattataagatacttgttcaaaactttttaaatagtaattttacatccgtatataattctatgaccaaatgtatatttctcacggtattaacatgaaatttattccatatatatgtgcatgcacaattccaagaatcttcacaggaaccaaataaaacagaagttcccattccttgatattttctaactctcatttccggtacctttatccatagccttttactgttcttaataagcaattcctttatttttcttatgtgaaacggtggacaacaagtaaatgaagcaaattcatgtgaatctatgagcctaacaacttcttgcctataatataacgggggatggaagcgtgtgtgtgagagagttatgattcatgacaccatcaactcgtgactcatgagtgaagcttattaattgtttttaccttaaatggcaaggactgtgatgaagggagaatttgaaatgattgttgctattgtaaaagttaaggtaatattcactatcgtcactcttcagcgcacttatgttttttatatcgtaaccgttatattatctatcatcagtggcgtatctacatttttttttttttataactattcatatttatcttattnnnnnnnnnnnnnnnnnnnnnnnnnnnnnnnnnnnnnnnnnnnnnnnnnnnnnnnnnnnnnnnnnnnnnnnnnnnnnnnnnnnnnnnnnnnnnnnnnnnnnnnnnnnnnnnnnnnnnnnnnnnnnnnnnnnnnnnnnnnnnnnnnnnnnnnnnnnnnnnnnnnnnnnnnnnnnnnnnnnnnnnnnnnnnnnnnnnnnnnnnnnnnnnnnnnnnnnnnnnnnnnnnnnnnnnnnnnnnnnnnnnnnnnnnnnnnnnnnnnnnnnnnnnnnnnnnnnnnnnnnnnnnnnnnnnnnnnnnnnnnnnnnnnnnnnnnnnnnnnnnnnnnnnnnnnnnnnnnnnnnnnnnnnnnnnnnnnnnnnnnnnnnnnnnnnnnnnnnnnnnnnnnnnnnnnnnnnnnnnnnnnnnnnnnnnnnnnnnnnnnnnnnnnnnnnnnnnnnnnnnnnnnnnnnnnnnnnnnnnnnnnnnnnnnnnnnnnnnnnnnnnnnnnnnnnnnnnnnnnnnnnnnnnnnnnnnnnnnnnnnnnnnnnnnnnnnnnnnnnnnnnnnnnnnnnnnnnnnnnnnnnnnnnnnnnnnnnnnnnnnnnnnnnnnnnnnnnnnnnnnnnnnnnnnnnnnnnnnnnnnnnnnnnnnnnnnnnnnnnnnnnnnnnnnnnnnnnnnnnnnnnnnnnnnnnnnnnnnnnnnnnnnnnnnnnnnnnnnnnnnnnnnnnattattttttatttgagaaaatatcagaatattttttacccgcacttaatttttttttttttgttttgaatccgccactttctaagattatacaatagctgcatttattgtccttattttcaatcccatcatttgttatgttttctaataaagcaggtggaggttcctcaccaccactttaaagaaatggcttcacgctattagaatctattttctttatgtgcaatccaacccaataattgattaaatttaattgaaaattataggatatgaatataatgtaattaattaataatcaatgaactgatcaacttttaaataactcaatatgttaattaccacctaaaaatcaaataattaagtgtcgacgtccactccccgatcgagagaggacaattgctcaacacacgttaatttaaaatggtttccaatatattaaagtcaagcatgacgataaatatctattaattgttacattgatgaaataatttcacttgcattttacgtatttgatcccatcatctcatctcataggtataggtatacaaaaaaattgcaataatattaagtgtcactttgtcacagcccacacaaacgtttaggagggaccaaattcttaattcagtaaaatcattgtcatgaactgaacattttctctgcaggaaacacttaaatattcacattcctagaagtagctgaaccataacttaaaaaatccatctcatagtgcatctattaccagatgaaaatcaaacattcaagattgtccaaaatctcatcattcatagcattattaattcaaaatgtcaaaataatgttttgccaaacgaaaattaaaattgaacaagtggtgacagttaacatagtagtttatgattctataactatcataaagaaaataactctatttggtgttttttttttgacatttttatctccaactattaaaaatcagtaaccattataccatttcattttaacttcaaactgcatttatctttttttttaaaacaaatcactgcgtaaaaaaaatatattcacagttaacttccatgccttcgtgagtattttgcacttagtatatatacaaaggagggaaaaaaagaacatttgaaagcatgcatagagaaagatccaaaaccagttcacccaaacaaagaggagcatagtggggggcagttgcactcaatatccgcaccccatgaatccataaccgctcttcttctataaaaataaatacactctcagttactcaacgctctttctatttctactgatgcatttggcaagtctcataatttattcaacttttcttaaaacaagaaaaaaaaggtttttttatgttgcttctattaaactaaaaaacaaaagccacgtttattttcctagctattactctccttctttataattcatatataataataacatcaacatatgcatgcctaatatatcaggattggagcagacgtatgtatattatcaccatatataacgctcgcatatttattgcaatcagctactccacgcttcaactctaaaaccgttactctactatattcatcagtaacacaagctttttgttctcattttggagtttctttttcccactttgctcctataataataacacatcatcaacagtttttaacatacacaaaccttcatgctgagtttcttattcgttgcgtggcaacgcaataatgatgatgatggggttggtgtcttccagagttttgttcttgtttgttgtttcggttttcgtggtttgggctcaggtggtggatttagcagaaggtggtgctgttcgaaattacattagttgggaagatttgcaggtggatgaacaaaggttggccgtgaagtcgtcccataaccaggttcgagtcataactgttaaccagaatggtgggggacattccaaaactgttcaaggtgctgtgaatatggttcctgataataacagacaaagggtcaaaatttacatttttccaggaatttacaggtcagtacttaactgcatattttttcatactactttttgggtgttgttttcttattataattggagtttcatttcagtaatccatatgctaaagattttgattaaattgtcaacttgaattattgaggtgaaacactgattttgatcgaagaacaactccaaaatctgagttttgtcctttttttctgatttatatgaagtcagtaaacaaacgtctaattcatggatatttgaacccgagtatccgaaaaaagcaaaatattttatgaaaaaacaggaaattcttttaaacagtatgctataatggaaaaaccttatattttgaaattaattcatcaaattgatgataaaatacatggattaacaattagattctattgtgtcattaattttcaattctaatcaaaagaagttgttttaattgtttgccttgattaatccatatttttgaaaaaatacattttttttttttgtttttgggttaacggagctgggtttggttggtgtttttgatccaacagttacatttatttggtttcctaaaatttcatgagtcatcaaggccttgaaggcttgaacttacattttttttttttttatcattaaaaacttgacttatgttattttatcctttgtgtatatgcaatttgtgcagagaaaaagtgcgtgtgcctgtgaccaagccttatgtatcatttatagggaaaagaaatcgaacagcaagtcctattattacttggaacagtaagtcatctgacaaaggcccaaatggcacagcattgggcacctatgcttcagcaacagtgggagtggactcagattatttctgtgcaactgggatcacttttgaggtaaggacacacaatttttggtaccctggattccctgcattccttttcaacacattcaacatttcagaactattgggtgaagattacacgacagtggttccaaattagtccccacagattcaaatatatgtagaaaaagttcccgaaattagcttttatgattcacataatttgttagtttcatatagatcctgcgtggtatcattaaaatgcgaagtcctacatataagggataaactgcattttaatgataacatttgaaactaacaaattatgtaaatgtaagaagttattttcagggattttttttttaacttattcgaattcagggactgacttagaatgactatacactttcagataccaaaatgaccattcagccttaaacgactcatattttctctcagtcaatcaacttaaaacacacatttaaaaatctgagtcagtccaattttcattcaatggttataaatgtactgaatgtgtggaaaagtgactgcactaaatccaattccaacacaagacatgtgcattttggactatgtcaaatgccaatctttgggtgcatggttgcagaactcagtgattgcatcggctggtggaaaagggatgcaaggagtggcactgagggtaagcagtccaaaagcaatgttctatcgagtgaggattaagggagcacaggacactctcttggacaacacaggaaatcattacttcttaaagtgtcgcatcataggaaaagttgattttatctgtggcagggcaaaatcactctatgaggtaaatataagatgaacttttttctctgttactaaaacaaaactagtgaccaagtttattgaatttaattctgatccttgagaactatggagcagaagtgtcgtcttcagtcaatagctgagaactatggagcaatagcagcacatcatagggattcaccaacagacgacacgggtttttcttttgtagggtgcagtattagaggatctggcagtgtgtaccttggcagagcatgggggaactactcaagaattatatactccaaatgtaatatggatggcattattaatcctcaagggtggtcagactggaatcattcacataggaagaagtatgatagtattattatttgctccaagtactaataacgcaatttctaatatatatttttaacaaactctattattggttaaaattcattagaaactacaaattgtgatttccaatacattctaaccaatagtaaagtgtgttgctagttattctctgttttaaatatgacattattattccattctagaattcatagtgcagaatatgtctaagcatatatggtacttcaggactgcagtgtttgcagagtatcaatgcaagggaagaggagcagatagaagacatagggtgccttggtcaaaatcattcagctatccggaagcaagtcctttcctgtacaagagcttcatagatggagaccagtggctcagactgtagcattatgatgcaccaattacatgacaattattcattattagtttatatgcttgttattactatgttacgtatcccccaaatgatcaattttgatgcttactctttatcttgcaagggatttttttatatgtatgactcctgacgtgctcttactcttgtcaatattaatatgaaagcactatcattgtcatgttatttgcaaaggaaatgcctctcttatagaagtgaggttaaccattacctttataaactatatttaaacaaaaagtgatgttgtctattatgaaattaaaatatgccacaaaatcactttataatttaatttatttgaaatttttatataaagttatatataaaacagaataatatgcttaaacaaaattagtatttaaaagttaaatttcaatctcattttcatctatttcataaagaattttgcattaataattaaagggctttcatttgtgtcatgtgatacttgggattagggacagattcaagggggcaaaaaaggaccctagtctcccccctccatcaaaactttatataaaaaagaaagatattaataggaaaataattgttgattttataattttctaccagtaaagtaatagatcttatctctaattttatatatatgtaatcaataatatatagcttatatacgtcactgtataacaatgaatgcccaaaatcaagaatctgtacctagatcaaggcgtcagaacagaaaattccaacaaaataaacaacaaaatcaagtaaattattttatcatgtcaatttagtttatggtcatccataacctcttctgcgcagagcagagatgtactcaaggttaaatcaccttgcaagaaacatctagcattgagaactccatccccaaaattaacaagtgctttccagcaacagaattacaataggcaaaaggaaaaaatggttcaagacatgagatgcaagacttacgtaaaacaaaagctacattttctctatttaattgaatcacttgtcaacttgcagtgacttcaaaatcttggatgaactgactgatcaacttgtaatgaaacagacaatctcattatctaccctcaacaaagatcatttgtttcaacttgcaatgaaactgaatctcatttccagaagtgaccacgatttttttgttcttgcattctcctgcatcatttggaaacacccagagtaaaaatgtgggttgaacacaacacaggataaatcattagtgtaacgtcagctatatacacaaaagaaaccttcaaccaccaatatgaactcagtaaaaacacttaattctcataactatcagtgaaaacataaactgaattgaaacaaaaaaaattcccttaagagcgcatttcacttgttctcttgttattaattatgtttgcgttataatcacaaattctatactgaaattttgtattttcaaaatttagttaaggaaatactgaaaatattataatcttcaaggtttctaaaagattaaatattacctttgatgctccttggaacgcctgatgaactcacttggaatatcacatccttggtaagaggctagcactggtcttatatcaggtggactactacgggcaacaactgcaaatagataacagagaaggtaatgcaacttttacaagcataaaaagtcaccacagtaacttcaaacataatttcatttataaatacatcttaagggaatggacttacactcaaggagtgatgtgaaaataaaaacaataactcattcttcaatatatcttaaggaatgcttacactcaagaaatggtataaaatccaaaagagctgtgtcatctatatcttgctgctgccaagccttaatagggagacagttctcaggttgtaggcaactttccaaagcatggccacttaaataaagaacttttcctggattcctgtttagttttgagaggtcctgccaagtgccaagcaaacaatggaaaaaggaaagaacaactcattataaaaatatccagaacaccactagtacactatgcatgtgatgtatcaagtatcataataaaaccataggtcttttattttatattcttcaggtgtaagcaaaattaattcgctattattttatagataaaaagataatatttccaaggcacttgttcttattatttgccatgattggttgtactccttccacaggtatttacgtatataattaattctggaagagaataatgtaagaacataaacacatactctgaagtgtttcccatcctgatacttagtagctggcctcgatagcctgtatctaatgcaatgcttggtatccagcctttctataacagggtctacaaactgcacaaatcaacaaatgtaagaatatatgaatatgaatacctatacgagcaagtatccattcagaatatagagaagaatcagattaccatattttgttcatctgtgtacaccactatttcgtagaactgagctaaatgttccaagaaggcatcaactccaggtcttttaaaagtctgccaacctgtatctcgctttacataccataaaagtaaaattcaatattgtagtcatacctctataatatgtaaggacctccagcaagaagcaagacaataagagatccaatggattttttatatgacataaagtacataaaggaaagtggaatgtaagcaacacactctttaccgatggttgaaattcatgagtcttactccctatttagtggctcctagtctcctactactgatttagtcacccaacatgaatttcaaccaataatgaggagtttatcaaatttctaccaacaaaaaagggtgaatttgcagtagacgtcttaccgtccaaatatagtgaatcaatgtctcattgagatcaagaacaagtgtaaacacatgttgctcctgaggaagcaaatcaggaaggagcttgtctgtgtatggttcagtataactctaaaaaaaaagcaaaagagaacagtattaacacaaaggaaggaaatataatttattttaaatgacaagtgtctgccaaaaccaatatcagaatattaaaaagcaagcatgtaccctaacttgttcttcaattaaccttcttgcatccaaataaagctctactgctttagcaggcactggggtatcacatgcaaaagaatcagcatgctgttaataacagaggtcaaaggcatgcatatatataactaattgggagttgaatacccccaccccccaagaagtgcatacaatgttaatttgtctgcactgatcttcttcaacatctacaatacaacaagttcttgccactgctcacttgccttttctaccccctaccctccaaaggtggtggcaacaaacatgcttatatcccacattctcatccatttgcaatatttttctgcagcaaaagtaggggcatataatgactatgattgggcagacctatggtttatttgaaaatgactattaattttagcatttatcgcacttaatactaatggaaacagtgttttccccatgggacctttacatactatttttcagttgagtaaaattaaaaagatgtccatgcttatccataacaaagagcacttcataaaatcacaaaacagaaatatagaaccatctaaatgacgagctcaagttttcctattcatataacagcaacacttcaggggaacaaaagttcacgtgaagaaacaaaagcacaacttatttaagggaacataataacagtaatacaggataagtgtgtacggaataaagctcagggaacacacctgtcattgcagttgagtatagcaaaccttgaaatttctgcacaagatatggactagaacatgtcaccttactatacattaaacttaagaaacttatcattatcatatcaaaaccaggcagaatccaacattaagtaaaagtaaggtccactgagggcatttccacgaagcaaaataataggatttaatccgatttcactaaagtgttttacaaaatcaataaaagaaaaccactgaatttttgacgtagggcgacgaaacagtcacgcaaactacacaagcaatgaaatggagccaaaagtaaatttgttgaacaaatgtaaacgttaaattcatagcatgtgcagagcatttcatataataacaagaaacaacattccaatgaccagctcatcaacccaattcaggttagatatttaaacccccaatatgattctaaaacatagaattagcaaataagaatgaaagtgaagaaagcctgagaaatattcaatactgacatcgagagcagtggctccatcaccggcagcgtacttggccgattcacgaaacgacctcgttttctcttctacttcttccaaactgtaagctgcatgtttcattccaacaaaaaaaaaaaaaaacttcaactaacgtcatttccagatcagaatgattcaataacaaccctaacacatcaaagtgacaacaccgaattaaaggaaaaaaaaaaaaaacagacacaaaaatgttactagattctgtcgatcaaccctaaatggctactctgaaaatggaaatgaaggaaaacgaaccgtaagaagcgtaaccggcaaaggcagtgcctccggtgagagcgccgacgacggcgtatttgaggaagttccagcggctgggagaagcagcggaaggaggaggggggagaggtgtggaagcggcattggtgcagaggaatcgcttcgatgccaatgaaatcgctggcgatcgaagaattcccaacgacatagttgtgatgtttgtgagcagtgacgaagcgagaaagggttcaagtagggttttgctcttgtgctttgcagaaacaagtagaaccacccatcaacttcggctatgccctgtttggctaccagttattccatcgtttcttatttcgtaagctaatcgtgctttggaattcttaatctttggttgtgcttagggtattgtactgttttagttttattttcccctttggttgtgttttttatgaacaaatcaacagataaaaaggcccgcccaataaaaaaaacaaggccaggcctacaaacagacaacccttccaccaaacagttcaactgtacacgagaaaatctaaataagtgacaaataaaagaaaaataaaagtttataagtgcagttgtgttgtgttatttttcagttaaaaatttcacataaatcgcacaaaagtgcatatatgatatgcgcccagcatataatcttttccaagctattaaaagccaaaaatcatcaacaaatagcctagaattgcatataattatgattaatgttgataaatctgttcctgtcatgtgttgtgctaaattgaacatctttatagcaggaaagagcagcattcaagcacttttggaagcagaggtcgccacgccctcagcgtggaaccccacgccaccagcgtgggatgctatctctatatgcaaattcccctggacagccacaccatcagcgtggaaccccacgccactagcgtgggatgtgaagtaaagaggccattttctctggaatgccacgctaccaacgtgggagtctgttgattgtgtaattctgaaagctgatggaggggcagatttggatttttaccgtccccttataaatactgaagcctcagcattgaggagggactttttttggacgaaatttcaccaaaggaaaggataggaagagagcttggaggcttagctagggtttggggattgagagagcaagtggggttccttccttcttctcttctttctccttgcttgtgtatcagctgggcatgcttctttttgatgtaccaagagccaaccatgaataggtttggatagttctattttgtaactagggccaagcacttgatgtaaatcttatttgggttgtattgaatactattattcatttatctaaagctattttagtgcactttgcttgaatgttcatatctctttcttaggcttaaccaatctattaaaggttttagagctagggttcacaataggaatgtgaggctttagtcttggaactaagtgtggtagcttgctttacattacccaggaatgggaatgtacgtgggtagttttttcattatgttgcttaatgcttaaccctaggaaggtgactaagggattagaactttcaagtgggctaaagggttgtttcactgaggaattgataaacaactgaacttagatgcacatattgctaaatagcttaactaattgaatgtagtacgcaatacggaccatttgggaggttacattgagtgtgggtgccctggctacgcttcgtttatattgttacaacttactttttgtcataacacagttttatgtttacaaaccttgctttacatttaattgttcaaacaaacaaaccatattcttcgccaaatatttgttcatccaacttttagatttaagttataattgaatcggtgcactaatcctcgtgggaacgatatcttatctatcaatataattgggttatatttttgcaacaattcatcaagatgatgcattaaaaccttaaagtgattctattaattaatatatgttgtaaattgtatcaagttataaaaagcaaaaatttctctccaagtcatttttgaactcgaatttgaaacaattatttaaattaaaataacctaaaaacaattaatatcaagcttaatataaggtgaatagttaaaaaaaatgaaaaaaaaaaataaaagaatcataggtcttttgttaacaacaattaatatttacccataaaaaattaatctccacaacatagggaacgctgaaacacaaacacactgtatccaacagtcacaattactcaatacataagcattgagcagttaattttaaacttatattatgggattaaagtgggaggtgactttggaggtgattgtcttcctaagcttccttctctctctatctggcccctactttgaaaaattccacttgacatgtagaaaacctcaaacaggtgaacttgaagaaaacaattgtcaatttctgttacaaatagtactctgacaactggatactacccttcatgacaattgacaaagtctctaaagagcaggtgagcctaatatgctatctgcctcacaataattttccatccaagggcatttttggaaacccaaaaatagaatctctcaccccaccattgtatataaggaggcctccctcatacaccaaaccacaccatctcacagaacctgtgtcaccaaccctccctagtgtcatttcatttccttaatttcctttaaacactatggattatccacttaaaaaccaaaatatagcaaccatgactcaccacctaaaagctcattactatctagttaagcttactcaattattcgtttcagtatccgtgtgttccttcatcttctcaccttcttccttgcttgttttcctacattacttcaaattctatttctctacattccctttccaactttatacacacaacatagacaagaactccatgtttctactttgcaatggtatccttgtttttgttggtataactaaatctctctccaggtctagttgttgtcatgataataagccttctacttatattaaagatgatggttcacaatctcggttttgggttattgaagccaacgagataatgttggagatagtagaaactgaggaacaaactagtgagcctgatgaacagaacactgcagttgagcaagtaatagaaatagaaaactgtgctgaagaagaagtacaagaaaacattgagaagatcattttggtagatgaaggacaagaaaaaggaagtagcttggttttgaaagaagaggagaaggaggagctagatgaagaaactgaacaattggatgtacgtgatgaagaggaagataaagggtcagaaactgattacattctgattgaagaaagcatagaagatgaggaagaaaatgtagaagaagaagaagaaagctgtatgttgagcacagaggagttgaacaaaaagtttgaagatttcattcgaaagatgaaggaagatctaagaattgaagctcaacggcaattagtcatggtttgatttagtaacaaccatggtcttcttttttttctttcttagggaagcctagttatttgttaggtctttctccttttctgttccacttttcttgtactttagttgtatgtagtatgcatccctgaaattttccaaaattatttctatgcttttctcccattggtagcaacaaagagcaggctttggatatgaaaattttgtttaaattgaagtcataaaccaagcacatgatcacaatgttaatgaagtatatatgacacagtttgggtatataatcaaaactatccccttccagtcttccactaaactcatttaatctatgcgatacactgttaggatttaataacatgatgtcatgcatcgaaatagaaataaatttggatactgttattcttaaatgataagatatgatcttaatagggtgaaaaggaaactaattttattatgtaaaaactcnnnnnnnnnnnnnnnnnnnnnnnnnnnnnnnnnnnnnnnnnnnnnnnnnnnnnnnnnnnnnnnnnnnnnnnnnnnnnnnnnnnnnnnnnnnnnnnnnnnnnnnnnnnnnnnnnnnnnnnnnnnnnnnnnnnnnnnnnnnnnnnnnnnnnnnnnnnnnnnnnnnnnnnnnnnnnnnnnnnnnnnnnnnnnnnnnnnnnnnnnnnnnnnnnnnnnnnnnnnnnnnnnnnnnnnnnnnnnnnnnnnnnnnnnnnnnnnnnnnnnnnnnnnnnnnnnnnnnnnnnnnnnnnnnnnnnnnnnnnnnnnnnnnnnnnnnnnnnnnnnnnnnnnnnnnnnnnnnnnnnnnnnnnnnnnnnnnnnnnnnnnnnnnnnnnnnnnnnnnnnnnnnnnnnnnnnnnnnnnnnnnnnnnnnnnnnnnnnnnnnnnnnnnnnnnnnnnnnnnnnnnnnnnnnnnnnnnnnnnnnnnnnnnnnnnnnnnnnnnnnnnnnnnnnnnnnnnnnnnnnnnnnnnnnnnnnnnnnnttatcataggaattgaaaataattattgaaacatttataataattcacgtatcaaatttaatcaattgcctcaaaacttatatgattgttgatagggtccattattttgtattttttgattaaaaaaattgtaacatttcagccgaaattttatctctggcaacagtattttgtcgtagcttgacatgcaagagagaaattatttgagagtggatttgatagttccaattgttttattaaagaaaaattagtaatctgaatgcaaacaaacaagtgatttaagaacagagattgatatttaagaagaatgtcagtactatactatgtttatagcaacatgttcaattagttgttgaaagatgagaccacaaatacaaaccacttgtctggttattagaacttatattattgtctggccaacaagtggtatctagatcgaagaaaacctgttcaactgtggttgaacttaaacagtctttttctgtatgatccaacagtattacgaataattgaaaatgatttgcgattttattagccagagcaaatggtacacgatcacaaatctgattcatacaggtcagcccatcagttaggtactggcttatagctaagaaagatagtgcaaagtacaaaactgtacgattttattatttatattattattattttaatttatctatttggtttattagaggcctttttcccccttaaaaaaaatgtagttacttttacggtaatttaatttaaattccttcttttgtgagagctactataattttagttagtgataagtggtattatgaagatgtatgcatgaaatctacaatttactatcgttgttaatgtctgtcaaaaacccaccttttacaccctacaataatattaaaccatgatcatttgtataaatttcgtaagaacacttttagtacacatagtagctatgggaatttttttattataaagtatgatacttgcatactatgccaaaaaccaggtcttttgtaagtactttgcatgtttagccatttatgaatggttatttatctataacgaacgttaatgtgtctcaacgctagctctgtcctttagttattattctttttacttccatccaacacggaaaattcacattttttgctttagaaagattgaagcacgtatggataagtctcacaaagtggctaggactaggagcaaatgcaagtcaatgattgcatgcacccagcataagacgacctaatgaaagtgaagtttcacaaatatcaaatcagaagatggcccaggaatatatcaatacatagttgacacagttctttcagtttcaaagaattgatacagaaatcttatttgggaaatctttctaaattcgataaacaaaaacttcccgcaaatcacaaacgttttttttaatttaatcggccaagaaattctctagtcaagagagtcatagactaattcttcaaggtatgatttaatattcgtttaaaaaactaacatcttctaatatatgttctttcatacacttaagatttaatttctacccgcatacttatgagacatacttatctatcaagtatttacacaccatttggtttggtttgccctttaacgttaataggtaacataatactctttaagttgaaggcacttaaacaattgagcaaaaacaatgatatttggacatccaactttttcaaacattttatcaatattcatcatttctctctatcttttttattatcacttatcatattatatatttttctctcttttctgtcttttattaggtgttaaataggcattttgtctccaaaaattaattttgtaaataattatagcctataacaagacactgttgttgtgaaatttctgagtggtaattatagccaggtttattaagtgatattaatgcctatattttcatatgcataatgcatccgcaaggaacagaatccatcaatcaaacttagcatgcaatgacttttttctttgcaaccagatacccccatgatttatctatagtttcacttttgcgtaacactgtaaacaaaaatgaaacttgatgtggcaccttcattcccacacataaaatgtaacttcacccgaaagtttaactcagcactaccattttctggacccttctcaaagtcaaacccattagaccatgttacagctctgggatattctctgttgtccatcccatattgatatctgtgccaggaccaggagaaatatggtcctagacggcctaaaacctgagggattactcttctgtgctcaatatcaagttgctaatatctattcatgtataaagacaacaaggacaacgcatggtatatgggaatagtacaacttagagacttgaacaactacagtaagttagtataacagcataagaatagagagagttttgtttttttatttctgaaagcaacacaagggtttgtcaattacatgctatggtacatatggccaaaaattcataaatgtcattacactgataaggcacacaaaactatgggcctttcattttcactgccttaaatggattttgatcaaatgaagctaagtcccaagtggatcctccctaccaaagtgaagtcagtctcgaaagtgaaaggttttttgtttgatatttctctctgtagagcggatatcaaggtgggtgaggtctggaaagaccctgccaaacttggtgggactaagactaactctcacgagacaaaaactacataatagtagtaaagtctaactaaagatatcttccttctagataaaaactactatccttgtgtcctacaaagtaccgattcatgcatgcataaataaggcaataattaatacaatacaaacaaagcaaatccaagatgaagaataaggaaaagtgcatgtatattgttacgtaaaaaaagggaagatgagcgtccacgtgagcgctaatatatcatgtggcaagggtgcttctcacagataaaattattgattagttggcttagaagaagtcgcttttgatgtgtaaaactaagcatatgaagttgtgttcataaatcaccttgatgatgacagaagatatgattgtcccttcgataccaataatgcatttctatatatattcaaaataatgaagtggggtcttttaattcggtggcttagccccttgaaaatagagttattaatctcatgaagagaatgagaactgggaggtgtatgcttgcaattgatttacatcacagattttatgtcaataatgcgcttgaaagcaaatacatgaattgaaatctaagtggagtgcacacgtggtgtacacgacatcttttgggggactcttgaaagtaactactagtgttttctgagatgttctaaattctagcatcggtaggctctgcatatgtgatgttaagtctaataaagcatgttaaaaggccaacttaagtatatctcgagaaaacttattaggattttttttttctaacttctgttgcacacttacgtgcatccacaacttttgtcttttaataagaggatactctttgtataacattttttggtaacacttttttctcgctatttctattacattaattatcttattccacccttctctttctcttctttatatctttccttttgtaattatacacaaaattgtataaatttattatacaaaaaaaatgaaagaaagttattaataagtttatagatgatattatgagcaaacccgtaagaaaaaaatgtcacttatcttattacgattcttaattaataaccactttgtttacctttttcaatnnnnnnnnnnnnnnnnnnnnnnnnnnnnnnnnnnnnnnnnnnnnnnnnnnnnnnnnnnnnnnnnnnnnnnnnnnnnnnnnnnnnnnnnnnnnnnnnnnnnnnnnnnnnnnnnnnnnnnnnnnnnnnnnnnnnnnnnnnnnnnnnnnnnnnnnnnnnnnnnnnnnnnnnnnnnnnnnnnnnnnnnnnnnnnnnnnnnnnnnnnnnnnnnnnnnnnnnnnnnnnnnnnnnnnnnnnnnnnnnnnnnnnnnnnnnnnnnnnnnnnnnnnnnnnnnnnnnnnnnnnnnnnnnnnnnnnnnnnnnnnnnnnnnnnnnnnnnnnnnnnnnnnnnnnnnnnnnnnnnnnnnnnnnnnnnnnnnnnnnnnnnnnnnnnnnnnnnnnnnnnnnnnnnnnnnnnnnnnncattacatttaatattgaaagttttaaatacaatacaccaattaatatactcaaccaattaagtaagaaaacatggtttcttaaacagacacatatatatggcttataaaataatgttaatcattttaaaaattattgctttaataaaatttaacttaaaattaataatgcctcagcaaagttaaaacaaattgactttattatagttaaaaaatactaaacaaaactaattacgataattcagtaaatatttttatatcttaaaacctgaaaaataagctataaataaagttataataattttagtaaattttttatatatataaaaaaaagacttattataggattcactttaattgaggcatgaaccccaaatcatagcaaataaatgccgaagaccattacgttccatattgcttataaaaccctctcttttttataacataaaaccctgttcgatgttcataaaacctttaaattgggtagacaaatttgccccaaagatcctaaacagacccatttctaccccgacatgccaataagcccattcccccaccgacaagtaaacttaccatttgcaaaacaagcggaatttcgaaaacataaaacaaagacacgagtaataactttgtgtgggacgcgagtcagcaagaaatcgtttaatcttccagaaagcgtaacaaatggcatgtactgattatgccctagtccacttgctggtacagtgcttgacacataaatgtccaacatgctacattatcaatttacattcaattttcgatggtatgtaagcctctgacaagaatgaaagtgcgtgcacagataaagcttcaatctcaaactttactcctctttgcagtatcaactgtagctccaaccttcataacaaacaataagatacacagttgaagaaaacgataaatgttttggaatgtatatgaacaatacctccattgtggtacctccctttgaaggtaccatctaaataacatggcttcaacttttcttttgtctagaaggaatgttgagaccacggtatttataagatcaaatatgtaactaggtcgatctcacgcattacaagtaatatccttatttactttcagcagtcaagggaaggagacactgatttggaacaaaatatctctcagaatcagaaggaaaaagctccaagccagtgtatctctgggacacgaagatgtttcgtgtctacgccatttgctaacataatcgtggggaatagattagtcaggcaggatatgaactttaactcagccattacagagattcaagtgactcaatgatcctgtacatcttatattcagatccctataatgatatacatgttgatgtatatcttaattaataaacttataaatactaaccattgaaccgaatctgtaagtggtcaagatgtcaaagccatagggatcacaatctaccaaacaataagcacgtagacgcaaattctcaaccagaagccgcaaaaacctgttaggatacaaacagacacattcgcaatgcaatatgaaaaggcaagctgacaagtatatgaaaacaaaagttcgcaccttcttgtaggaatatccgggtagcctcttccctgtataaagatagaattcaaacaaagaaatattgttgcaaacgaaactaatgtcttcagaagattgcttacaatgatgacaatacagcgatttgcattgcagaattggtcgtttgccagtctttggaaaactgaaagtgaagttcaacatggacggtcttttcaatagaaagtaagttggggaagaatcttgtattttttttcctcttattgtctccaaaacaaaaaagcatttgcttacctgattctttctccacaactaatatgtattgagcaacactaatgatatctatgcacaaggttaagcaatgtttcgctccatttcgaatcactttgcattttaagttaatatgaagtaccaaataaaattataagaaggaaactaaacgattgcagtattttcacccagaaaataggataccttgaacttcttcaacgtgaacaggaacatggtgggcctgcagaaaagccaaatgcctgcatataatttaaatggtaaaaataattactacattaagatcagttcttagttcttacagtgttgggagaacttatgcaatcaaatatcctttctccttcagtgaatcttatccagcccataattaacctacagcagaaacaaacttgatccataagtcttaccacttgccagttaaacacattagcacacatcattacaatatgaaaaactcaataaaaggcaaaactatcagctttgagaaaattaattaataattactactgcaggaggagaattttgatgacagaatgccacatatgacatatgccagccttattaatgtacgtttaatggaatcatattttctcactatcataaattataattataatatgaataaaaacaggggatctcataactctaaaaaagtagtagattaaaaatacgtgtcttttgaacttcataaaaaaatttagacacgccagtggcgagattgtattttatacaaaaatgtacacacattcatgaaacagtattatatgtgaaaataaaactactactgttattattattaagaaaattctgacaaaaaagtgaatttttccaagattgagggtgatctcattttgtacccgttccctgcagaaacctacaaaaaatgaaaataaaagaagtataagcatcccaaacattaaaccttaaacattgataactttctgtttcaaacaaataaatagaaaaacaagcatatcagaaactcagatagaagttttattcaccaaaatccaccaagagccaaaccaaannnnnnnnnnnnnnnnnnnnnnnnnnnnnnnnnnnnnnnnnnnnnnnnnnnnnnnnnnnnnnnnnnnnnnnnnnnnnnnnnnnnnnnnnnnnnnnnnnnnnnnnnnnnnnnnnnnnnnnnnnnnnnnnnnnnnnnnnnnnnnnnnnnnnnnnnnnnnnnnnnnnnnnnnnnnnnnnnnnnnnnnnnnnnnnnnnnnnnnnnnnnnnnnnnnnnnnnnnnnnnnnnnnnnnnnnnnnnnnnnnnnnnnnnnnnnnnnnnnnnnnnnnnnnnnnnnnnnnnnnnnnnnnnnnnnnnnnnnnnnnnnnnnnnnnnnnnnnnnnnnnnnnnnnnnnnnnnnnnnnnnnnnnnnnnnnnnnnnnnnnnnnnnnnnnnnnnnnnnnnnnnnnnnnnnnnnnnnnnnnnnnnnnnnnnnnnnnnnnnnnnnnnnnnnnnnnnnnnnnnnnnnnnnnnnnnnnnnnnnnnnnnnnnnnnnnnnnnnnnnnnnnnnnnnnnnnnnnnnnnnnnnnnnnnnnnnnnnnnnnnnnnnnnnnnnnnnnnnnnnnnnnnnnnnnnnnnnnnnnnnnnnnnnnnnnnnnnnnnnnnnnnnnnnnnnnnnnnnnnnnnnnnnnnnnnnnnnnnnnnnnnnnnnnnnnnnnnnnnnnnnnnnnnnnnnnnnnnnnnnnnnnnnnnnnnnnnnnnnnnnnnnnnnnnnnnnnnnnnnnnnnnnnnnnnnnnnnnnnnnnnnnnnnnnnnnnnnnnnnnnnnnnnnnnnnnnnnnnnnnnnnnnnnnnnnnnnnnnnnnnnnnnnnnnnnnnnnnnnnnnnnnnnnnnnnnnnnnnnnnnnnnnnnnnnnnnnnnnnnnnnnnnnnnnnnnnnnnnnnnnnnnnnnnnnnnnnnnnnnnnnnnnnnnnnnnnnnnnnnnnnnnnnnnnnnnnnnnnnnnnnnnnnnnnnnnnnnnnnnnnnnnnnnnngacgaactatttaacaatcttttaatcataattaattaattatagaaaattgcaaacatatgtgaacacaacactgaataaccatttaaaacgagtcctaaaacttcttagtcttaagttggtattctttaaaatatgtttaaaaaatatatacattccgctgattagttgcaattgtaaaatcaaaattagtaacatgattatcatcaaaattttgaaaagactataaatatatatctttcaaatgtaaatattactttgaaaagattataatttataatttttttattaccatgttattattcagagtgtttagtggctttttatttatttatacttattttaataaatcttttagtatgtcttatctaaataggttccttttgtctcattttaataaattttattattaaattcttaaaataaatatcatttaataaaatcttactgttaaataaaatttaattaaatttatagtcgggagtcatccgtgaataaatgggaaaccatgtcctttttcttttccgacaacaagccttaaaaaagaagtcaaaatatggttgaaactcgaaagaacaactgccaagtggggcgcatatatgggaacttaatttttgtccttttcaaataatttatttatttttatattaaataaacaaaattctttaacgcggaattgattcatgattaattatggagaagctagatcatatgggatccacttgcattgaatcacaagctttcagaagccttcgccatactcaaatctcatctccttcagcaacaacaacaaaccacttcaaaggttagaactttcctcgcaattacgaattacatttgttgttattgtgatgggtttgtgttcctcttggcttcttagttcaacacatgtctttctctcactagctcgattcatgattggaatttccactgcttattgtttcgttttaattctcttttgcctgttcacttgctattgattagtcatccatgacctttaaattttgcggatttattctctgtaaaaaagtgttagattgaacttgtgtagcactgttgctatttctggaaatctaatgctccttgacatgaactgcagttggataagtctttcacatgatcaacctttaagtattaactgttgtcctcaactctgatccactttgttaatttagtttctcccaaatttaatgcatcattattgtcttaagtcttagtcaaggaggtttttttttttttaacttttagattgtgatcttcaaccatatttcatttctttcggatggctcttgcaagttacgattttgaagggatacaccccgacttgtttgtgtaattttgggtcactgtttttgggaacttttttgtcttggaggattgcccatgaatagaggaaaatacttgtgatggtgaaattctgtgagatgactaatggcccttttattctatttttttgtaatgagaactaaactgggaatgttcaatatgatgaggctgatgtaagtttcattagaatttgaggttaagaaattgaaaggtaaataggaagtcctagttcactagttgcgtttgctctatgattattatttttttggcatgtagagcataatgggcaaattcattgtatttcaatgctattatgctacttttatggcctattagttattttgcttacaaagtcactagctcagaagaaatggatgcattttctgccttttctttaaatgaaggcacgcaatttaggagatccatatggctcgtatcagttgtaagtgatgatccaaacgatttcattttgcatttgtggtggtaagctcgaagtagaacttggattgatctctagcacctattatagtatatatttgaggatactagcttattttttagtgaaagctatttggatgaatttatgtttcatgcttcatcatttaaatacttaaaagtctaataatggcttatggatgttcatttacatccctttcttatttgactgatgttgctagtttgaactgttttgcaattgaatcaggtactatattgcagatccttgttttctaaattcctctgcatggccaacaatggtgtaaaggagcccttgctgccggtatcacttgatgcgactcaaaagactaaacagcagctaaacaagagaaggctcctccgctttagaagtgctcctcaagcagaaattgttcctactgagacaaaaggcaatgaatcaattccccatagtgcgtccatatttcagaatttacatccaagctttaaaagagtggctatctaccttgcagtctacttaggtgtaggtgctttaatcttctaccttgtcaggaaccagattaaggggcagaaaacagatggaattcttgatgctttgtactttacaattgtgacaatgaccactgttggatatggagaccttgtgccaaatagccaccttacaaaactacttgcatgtgcttttgttttctctgggatggcattgattggactaattgtaagcaaagcggcagactacttagttgagaaacaggaatttttgctagttaaagccatgcgcaagcaccaaaaagttggttcaactgaaattttaagggaggttgagaccaataaaacaagatacaaattatttctagtctttttccttcttttgattctcataatcgcgggcacaatttttttggtcacggttgagaaattggatgttattgatgcattctactgtgtttgttctacaattacaaccctgggttatggggatcaaagtttctcaactcaagcaggaagaacatttgctgtgttttggatattgacaggtactattactttagctcagcttttcctctacattgctgagctaaacactgaaatcagacaaaaggaacttgtcaagtgggtacttaaaaggaaagtgaccaatttagatttggaggctgcagatcttgatgaggatgggactgttgggttagttgagcattctttcaaagtcatatatattgttatactatcaattataaaacatgtcttcattcattttatgtcttttgttttatttctcatagggctgcggaattcgttatttataagctcaaagagatggggaagattagtcaagaagatatatcacttgtgatgcaggagtttaaacagcttgatgttgatgattctggcacactatcaacttctgatataactcttgctcagtcatcttagactaacacattacattgcaccaagttggtgcagagtgttcttattttccactttgatcacgtaatgcacaccacaccagagctttgatgaggatggaaaatctgaaatttcttgaacggactggcgtttattggtcagtctcatgctatcgaattattgactacttgatcaaggagcttcttatacatatcatatcatgtaagtatataagcttaaaagtttacacttcagttcagagtcttttgtattttacagcttaatatacatagatgaacttggaacattcaattcaaaacacaatttcctcctccttggtttacactttttcttcgatcaagaagcatgagctcagggcacggatttggaggttcaacaacatcaacatcaacaacacctttaacccaagatattacatgtaatttttttgtgtgagtgttaacacaaaaaaaaaaatttgagaatgtgttgcatctatgcatttggattgtgccagcaaaactacgttatgaacaaaattttattatttcttcaatttttgttaatataaatacaagtccaatcttatcatcattacatgaacaaaaaataaagattttttttttattgctccttttctctctgttttctcttttgtcaattattttatactttaaatttttttgaaaacaaaagacattttatttgtttttttttcttccacaaataatagctaacaaaagagtctttgacaaatcactttcgtataattaattatcaaaatcacgttattaaagatggtccaataggcaaatatctctattgaaaggttgtttaatagtgtgtttggaatatgttataacaccatgttcattccaaaattcacataaatgatgtcagaagctacttgattttgctttagatgaatgtgtcagaagctacttgattttgctttagatgaatgtgtggaaagagaataatgatccacattgcaaaaatcattccaaacaagtactaagagcatgtttaaattaacgcttagaagacattatttaagtttatggaccaaacatgacttttgcattgaccaagatatttggatgtttattgaaaacataattctaaattgtgaactcaagtcttgttgaagcatttgaaagtagtttttgcatcaagtctgactagagtcataaaatttgttcaaaatgcagtcctctaatgttaatattgtcccgatgaatagcaaggcaaagcacattttgttattaaaacaaaaatcatgttactacatgctcgcatttacttaaaatcaagtcaaataaacatatatccaaatacgcactctaagtatagtaacttgcttgatcatattgtgttttgatctcatattggtttgaaacaaaaaaagttatttattcaaaataaatttatattaaacttgcactaatttttaaaactggtgaccttatgattaaatagtacaattagtaagcaaatgatatataaaagacttttccgtcatagagataatttcgatgtaaaggtctaaaggatgaattttagcagtaggattttaaaaggtgaataagtatctttcatccaannnnnnnnnnnngctttaaacgtttttttacgaaagctttatgaggttaatacttagtcccgagtaacagatgaaaaattgtgctattattcatggttgagcaactattaatagtgcacaaaattataaaagtaaagtttggatcaattttacccccaaaaatgtttttaaatttcctttaagaattgtttgaattgtttaaagttttatatttaattttctaaaaaggctttttttcgtaaataataataaaaaaaaagacgagagattttttttcagaatcttatgtggtagaagacttttattttctaaaaaacaacttttcaaattattgtaaaaaaattaagcatgggttaaagttgtccagttgttatctactactactggttttttaaccctttatatatgatctgatcagaaaggttcctggcttgtttgttgtttgtaaactgcagtcaatttcaaaaaatgatattggtcgaccaataacatcaccgacgattttttcaaacttaaaaataatggcatttgcgtatccattgtctcctatgctatcagttattgatcagttttacacaattatacccataagacatataatccgattcacttgcaaagacaaatagctataaacagattcaacacaattcgtacataaaatactaataaatttggttttgtttcaattcaatcttatcatatcaaatttggttggtgtctgacatttgcagcttggcaaaaactcttttgtgttgcatgaatatcattgctccctccaagtgagtcagcatctctcgctttaagtaaagttaaatatttcaaacctctaaagactaaagataacaaggaagaagaagaagggactggtggacgccataggcaacactcctttgattcggatcaacagcctctccgccgccactggttgccaagtatttatattctctattatcacttcacttccattctctttaccaattccaatctcaacctatttttatttctcttcagattctcggcaagtgcgagttcttaaaccccggaggcagcgtcaaagaccgcgttgctgttcaaattattcatgaggttaaacaactgctctctatctatttatttcaaccattcgcatcttctattattcactgtttttcatacaattatcagaattgctttcttttggatggaatatcaattattcattcattctcaatctgatatacatgtacatgtaccacctatagaatccttctaaatataattgcctcaattatgttattttcacctaagcgtatgctatgtttacttaaatacttacatgatatgcacaacttgctgcatgatatgaagatatctggaatctgcttgataacattaatacacatgatttaaattatgagttctacatcaagtagaataagaagtttaatgtgatatttaagtcatgaggctctccaacctgatgaactagtcttttgagttggactttcctcttatgcttaagtcataacaatatcagccttaagattgtccctatgattgattgcgcaggctctagattctggccagctacgtccaggtggaataatcactgaagggagtgctggaagccagtggcagagccagcttttacttttaggtagtgccaaattttattttttaagtagtgtcatggcccccgctggtttcaatgtggctctgccactgcaggaagcactgccattagcattgccaccgttgctcctgcctatgggtgcaggacccacgtggttataccagatgatgctgccattgagaaggtattttataatgattgtaatgtaatcaagtaaattctgtgatgaaatctagcgataaacctctaagattttgtgtacaattgatgattgtgttgcatgaatcaacctttcagtctcaaatacttgaagcccttggggcaactgttgaaagagtgagaccggtgtccatcacccacaaagaccattttgtcaatattgcaagaagaccggcatctgaagcaaatgagtttgcattgaagtgtagaaattcacaacaattgaatggcaaggaggacaccgacaaaataaatggttatgaatctaatggatgcaattacagctctctgttttgaagattgtcaaggtggcttttttgctgatcagtttgagaatctagcgaacttcagggcccattatgagggtacagggcctgatatttgggagcagaccaatggaaagttagatgcatttgttgcatcagcgggtaccggtggtactgtggctggtgtttctaagtttcttcaggttcaccacatccccccttcctccaggttgtagatgttgtcgttttgagtgtgaaagttatgtgagttatttctggttctatgttcaacaggaaaagaatccaaacatcaagtgcttcctcgtagatcctcctggctctggtttgtttaagaaggtaactaggggagtgatgtacaccaaagaggaggcagaaggaagaagactcaagaatccatttgacactatacaagaaggaattggaattaacaggataacaaggaattttgcaatggcaaaacttgatggggcctttagaggcaccgatagggaagctgttgaaatgtctaggttgttacttactcttttgtaaaccatcctacttttcttatttttagcggttgtttgttcttttatgtcaaacttgaagaaatgatgaaatgaagtgatatgttgtttttgatgtatcaggtttcttttgaagaacgatggtctcttccttgggagttcttctgcaatgaactgtgttggagctgttagagtagcgcaagcaattggcactggtcacacaattgtaaccattctctgcgacagtggaatgagacatttgagcaaattctatgatgctgaatacttgtctcagcttggtttgacacagaaagcaactggtttggagttcttgggcatcaagtgagaaggtttcttcagagtataaaattttaatgccactgccttagctgctatatgcttgagtgcttagtcttggatgagagtggacacctagaagttagaactgagggtgttgtagttattgatatagaagatattacacttgttaatacaatgttttgggggtaataggcggctcattctttgttagtcttcatggtttattcgtttattaactaggccaagatgaccaaattgttgtaaactaaatatattcaattctaactaactatttcagttcggggatgaattaggcatgcggtcttcgttttgaaattaatgaagctggaaatagtgcacggcaaaaatcttcgaatacaaaccaataattcaagtgtccaatacaatcatataatgaattgaaaaaaagtttaatagcgtggaaaatgcataaactattgaagttggacaattaaaatatatattgtgatgacatgacattcaaatttgagtttaatggttaatataaaaacttgcattggaaatcaataagaaatcatcttaactataataaaagttaaaaaaaattgtggatacataacagttatgaatgatattgtaaatgtatatttttttaacaaatattgtaaatgtgtattgagtgcataatttagtttctctttattgaaaattgtataattttttaatcagtaataattacaatttgtacaattgaggttcacttaatttaataattgtaccaaaatgaattttcatgtaattattgttcacttatcctttaattcttattatatcataataattcatctcaaaatttatatttttttttaaccttctcgtatcttaaatgtgtcattgatgttgatatcatttaattcttgatgaatgaatatcaataacttctgttataaaagacttatatttagaacatcttgagagacttcaataaggtaggtaaccttagctccttgatatttttccttgatcaggattagttggcaattgagatcaaggtaagtctccaattcccaaaaaaagcacattttactatgaggcacaatacctttattatcaaatcactaataaatttattgtcagagtacatgacctcatacttgggtctcgatagattagatcaaattgtataagtgcttaagtggacaatccaaattgtataagtgcttaagtggacaatcccgaagaataaaatagctcaaaaaaaccaaaatctacagtgcctaggagcgcattacctcctctcaaactcagattcttggcaatgtggatctaaccaatccttgggagattcctttgcattgttgacatttaatttccccccacccacaagctccctcaggttatccaccttattctccctacccatcccactatttctcttgtcagcttctttcagcttttgcttgaacttttgcttccggttagatgaatttagctcttgctgctttgctagtgaaggaggcgctccatgtgggcccaaatagatgttttcttccttcttagcctagaacacaaacaaatatagttagcatatacattgtcttcccagccagtataacatctaaaacctgaaaattatatagtctctaatattaggaaattttctttagctgacctttgatgcagaattagaagattctacatcaggaacatgaggtttattttgatctgagtcttcaattcccaaacttggaatcacaaatccatcagtgtctacaacaaaaaaaaaagtccaaccattcaacatcaaaagcaaaagcatttttgtccccatagaagtcatcccaacattgctaaatagaacgaaacaactatccctagtcagaaagtaaaaaaaactctgaacacagtcacagacttttcattttcatagcaaaacatatagcacaataaattgcaaaactgaaatatatttatgcataagtatagacataaacaacatgtcaacatgtaataacaaacctatatcaatgataaattctctgtatgctaggacattataattcctaccctaaatacctctaatttacatgaaaatcaaacagtgttaaaaattgaatcagctggatatcaaattaagctagaacaatgtgccttacacacggatgtgaagcaccgagcgccacaagcaatatctccggaatataaaatccagataacatgacgaacccacaagcaatagcagtgaattaattaacaaccaatccttgtcaaaatcaaatgagatcctcatatatgcaacaaatcaacaaaattcaatctgaaactaatgcagaaacaaataaataaataaataaaaagaacacaaaagatcctaatttcccccttctcggttccggtttggtcatccagagatcaaaagagaaagaagaaaaaacagaagacgaaattgaaggaaaaatggcataccccactcgtcgtcttcttgttgttcaatctgatgagagggatccatagtaaactgacgaccatggatttgaatgggcgataaagcccgattgaatagataacagcaaaatttcacaaacacaaatctcgaaagaataaaacacaaaaaatcaatcaaattagagaaagatgctttcttgtggtggaaattgagaggacaattaaaccctaactctagggtttactgtagacctttgtttggtttgatagctggtctgaagtgtcatactgattcggacagaattgtttaaagattgaagggcagttttgtcactttgattctcaagtgggattctatgtagtatatgctttttttttcctttattggtagaataattgatagtttataagagataaagattagcaattgtttattaggtaatttttaaaagttgtccttatatgatattattattttaattccgcatcaacattttagtattaaatgaaaaaatgtccttgctaaaactgtaatatgatatattcaaatctaattaaatttctttcaaaaaaacattataaaaaatatatcattaaatttttttaaaaatatttatgaattaattcatattatttgtcaaatttgtaatgatattaaattagatatttatttttaatattttaattttgattcttgttccaaaaatattttatatttttaatttcttttttatataaaaaaataattaatatcatttttattttgactcttacatggtaaaaagaagaccggtaaaactttgacaggagactgaaacatgaaattttatatgcagagttcttttaatgcataggttaaaataaaataaaaatataaatataaggattaaaattttagtttaaccttattcatttcataatataactctttgggaggggaggggtgtaagaaatgccaattttatgtattaaattaataggtgatgtgatattactttgttacttatatattaaggaaaatgtacataagtttcaattttattggtttcttttattgttcatagattctattctaatcaaatgcaaattggaatacaaatatacaataaataataatatatccttattttaaatttcatcattatttaattatccgtgtgttatatataaagtgagtacgaaactaattaagagtgaattattttaatttaacttatactcttaatatgaatctaaagaatgtatgtgttaaaacttattaattaggaagagttttaccacctttaatcagtttgacaactccgaataaggtgattaaaatgttataaagtgatatgtagagtacttagacctctttattttgcaccagtaataaattatttttattacgacatagattttgaatgtaaaaaattataattgagagtaatttagacacttatcttaattatatggtattacaactcaaaatcaattgcactcaactttctgcagattggcttcacataaatggtgtattcacagcaaattcgtgagaggtcatgcttgtggttgtggggggaagatggatacatgaaatatggtaagcacatggattttggactgatgggcatgatgtctacacgaatccagtttctataatattatttaccttgagtggctttctgttgggtgcaaatggttatggttctttttcattgcaataaaatttgttgaccttcccaagaaaaaaaaattgcactcaactttcatatataaagaagtttaatctcacggtttagcaattgttaaatttctgtttggttcattaatcaaatgatgttgcacaaaatattattgataaaaggttaataaaatcaaaatattattaaataaatgatgaaaagtgctagacttttataagaacattaatcattaaggagtaggcataataatcaacaagattttccaccaagaaacacaatcaaagtcacgagaaagcaattgagtcatgcgatgtctttttgtgaatggcctctgtttccacgactttcttgtcttttgttctctttcatttctcataataacatcatttctttgtaggcacgagcaaatgattatgagaggggattaaggctaataattgaatacaagaaggtaaaaaagggtaaaaatactgacagggacattcaccttgtttctgatatgtaattgcaaatgtttttctagaaatcaataaaaagataatatgaattgaagtctcttaccaattttttgcttaaacatgagaaatatgcatgtacccaccttgagtaattgtcatctgtcacctatgcatatggtacattattaatcagtcgccatttaaaacttcgaattattcaccaagatttgatatacttatgggacataatatttcaatattattacaatctgacacgtcataatattaattgtgtgaccattatccatcacaaaattgtatttctaacacctgtcctaagttttgttgatttttttgaaattactgacacgcttaacagcatgtgtaacgcgtacataatcacactaacaatagcacaaagagatttaaggttgaacaagaagtttaaaaaaaaatcatagattcaaatctcgatatttttaataaaattaacaaattaatatttatgaataaaaaaaaataacggtagcaccatcttactataaaatagtaattaagaaaatgtattaattaattttctgcttcataaaaaatagccacataaataaaaagagtcttcttcagtaaatacaagaagtagtaggtttagatcgatctaattaaaaacaaaatctaggcatctagtgtataagttgctgaacctacgtcttccttacgcaagctcttgaaaccttgtaccaattggcaactgtaactaaattgtcctagtagctgatatgttacctagtgtggaacaggatatatagtaatggggaatgcctaactatgtagttttagacatcttctgtaatggggcctccactccattaaagcctgcatgagcatgacatgctgaagcagaaaaggacttgagatcaattacttcttcatggctcaacaagagcctaaacaataatagaaagtgggtcattattacagaatattgattacttaatgtgcctttgttaattaagaattgtagttgtaggagcaaagttttgtcaacctgccatcacactcgaatcctttcattgctaccaaaagaaagaaaaaaactaatatgaattcaaacgtttctttgatgtatgtgatggggggaaatgtcatactaggaaagtgtctcaacaaaagaactcccacaaagaagtgttgttttgagaaatttgttgttttttcctgatttggtatattgagtttctgtgtggttttgtttggttgtgagtaaaatagagggagaagcaaggcccttcttgttcttgagttctcttttgatgaagtttgttttgttgggttcggtatcttagcatgtgtgggggaggggtcagatatgtctggcacatgcattggacaaatccaaggctttgaggttgtaaatattgttggaaaacaaacacctttgctatctccaagaggatcagatgcagataataaataataaaaggttttgtgtcagaggaaaaaaaaatagaagaaacggttcggttaacacttgccagttggattcctagctagtagagttgctcagcagtggaaaggaacttgatctttcaaggatcagatgtcactaaatgtaaccttatcaggtttggtgaaaaagagcatatttttctttggtgttcaagccatgatcttttgagtcttattgaaaatatatttttccctcctttgctccctgtttgacattttagcaactgtttattacaaaataggaagcagggtaggagctgaaagttatcagcattaacttatagcttaaaagactcttttgactgtcccaaattcctttgtagcacattgaaatttttctctatctttgctgtgtcacaatctgtattttaaagtcataaaagaagtacagaactacagattgaacaaattttcagccacttctttgtagtctttcccagtgatcttcttctccttttcaacagtacttcttgcagtctttgttgggtgagttggatctttgcatttgctttggctttgacacaacaagttcattctagtgaatgatcatggtgaaagtaactaagcaacaaatctgtcacaatctgtgttgttattttgccagtttcttaccaatcattctagttcttgtccttctattttcaatttcctttttcttttcagtttctaaatcctctccttcccttcttacactactgattgctcttctatctaccttgtttcttgtcacactgggaaagaaaaaagggtccctacatgaaaatcttgtccaagataaccaaccgaatttggatttacagccttcactgggagatgttactatccaacaaaatgaaacttctgagaggcaagctgaagcacactcagagtcctcatttccattagattgtgaaagaagcaatatcatggatacaagttttgaactaagtgctcggaagtatgagcaacaagctgatccacagtcagatacttcacttccatcagatagtgaaagcactgctagctcaaccatggatgaagaaagtattgagattcatcgcaatagaaatcaaaatcttgatatatctgatagcttggtctttgattatgatgttgatggggaggaggatggcttgattgaaatcaagcttccaaacaaccacttttcagagttcttgccagaatccattttcaagcagcaaggtctcacagagctcttggcagaaattaatgagatgaatgaggatgaaaatttaattgagattgatatttccaagggatccacaaagcatcaagatttgagattggagaaggagttggtttgcagattagatcattgtgttcttagtgattaatcttttattactaattgttatcttgagctgttattttaggtgaagttttagtcattagctattttccttcttgatgtttaccaaaattttgttctgttctattaacttggcgttttaatcttaagccgtgttttttttaattaagtgttagttcaaatctcagtcaaatctcctaattttatctgtttcgtaacattaaaaaacataatatgattatgttttgtttgaatgactatagactaggagtgaaaaatatatcagattttatataaataagtctgnnnnnnnnnnaaaactaaaaaagaggtgtagggagattgaattcattaaaggtgaaaattaatgcaattaatacaaaagagagatagaaagaaaacactattaattaatgttaataaacgataaattttgtttgttagcttttgtccaagtgcttagacatgtttgaaataatttgattatttttaataaattttaataaacgataaaaagtatgttttaaacaatttactactaacaatactcctttccagatttttgttgttgttgaatatactcctctccaaatgctttgcaatgattggaggtgatttcatagtagtgatcaaattcaagtgactaaagtctaaaattcaaataaacttggcagatgcttgtcttgtattgtgttttgaaatcacaatttgattgataatgtaaattataaaaaatataaaataaattaacaacttagattgtagttataaatcactaattgtaaatatttttctgttagtagcttagttaaattcaacaaaagagattattgacatggagtgtaaatattattaaaactgtcactacttcgcaaacgttccattgaacatcagttacgagaacggcaaatagctccataacgcgaattttgtggtagaaaatctagattctaggagtgttataaggtagtataactttaaaatacaccttttattttccaccttgcaaaacattgatggactaaatttatatttttcatctttcatcagatcaatttttactacatcatactttggaggatgaatttcactatttacctaaaaataaaatgaagcctaattctataaatggttagagaatattgtaattacggctaagatgtatatatcacaagaattaaacacataaataagtaaattttaaaattataaataatacatataaaagttatgcaatattaaaataaaaataaaaactaaaattagaacaaaatattaataagctcacttgtttttacatcctttacatgacattagtcattgcataagtagtaaaaattattttaatatttcatttattttaatataaaactatataaaaaaaaatgtttgagctatagcctatatataggtattcaaaagcatgtgagaaatacccaacgtgcttaatgccgataagacaatcatttgggagtgtcatacttgttcgcacttaagcttcacattcttattagtgtaacaccagcagcatcaatatgctatgccatatacgtttatacggaaataggtattgaagatcaaatttgcttgagaggaagaaaagtaacgatgaccaaactattcaattcattccacgtcttgtgccctacaattacttaattattcacatctaatcattttatgatagcgtttggttgtgatgtggacaccggacaaggaggccttaaaactcaaaagactcactgtggcatggccaacaccgacacatctaatcacaccttctttttttttttcataaataaaactcaagcattaacattcataacaagagtaatacattatattcaaaattagattttgacataacaagtattgtttaattaagtttttcatatttaaaattatttaacttcgttaaaagatcaccattttaattcttaaaaatataaaaataagaattaaaattctaaaatattttttagtattaaaaaaaaaccatttaattgtctacactacaataaaaaaaaagaattaaaaaatagaattttaaggactaaaataataactttataatgttagggattaatttgacgtggaagcttataaacaaaatcggggccaacatagaagtaagatcatgaatgaagtaatcgcaacttgtttccaaaataataaaaacccaaacctaacatataaatatatcaggctcaagttgaggtaattgtagatcagaatctcaaacctcgtgtttaattagaccctaagttgccttgaaccttatatttaagatgtgtgggcataaaacaacaaagtgactaaataattaaaatattagacggaagaaagaaaagaaacgagagaaggaggagagcatgtagcagatacgaaaggaacggtccagatgattaatacgacatccaatcccatggtgggaaacttgtccgtgcttatcgacaaacaacggccaagaaggttccacgtgtgaagcagataaaggcttattaacgcagccgatccaacggaccctgctcagtccattcttgctaaaaatattttttttttcttttcacggactctgaagtcaaccgaactcagaaaagcagagcagagtgttgaattgattggttaagttaagaagatggctgagtcggacaacgagtcgggcggggcgcagaacgcgggaaacgagggggggagcttcagcggggagttgtcgcctcgggaactggacaggttcctgccgatcgccaacgtgagtaggatcatgaagaaggcattgccggcgaacgcaaagatctccaaggacgcgaaggagacggtgcaggaatgcgtgtcggagttcatcagcttcataaccggcgaggcctccgacaagtgccagagggagaagcgcaagaccatcaacggcgacgaccttctctgggccatgaccaccctcggcttcgaagactacgtcgaccccctcaagatttacctccagcgcttccgcgagatggaaggcgagaagaccgtcgccgcccgcgactctaaggactccgcctccgccgcctatcatcattatcagggacacgtatacggctcccctgcttaccatcatcgtcaagtgcctcctgctgcctctcctgttatgggtaagcctgggcctgggcctgggcctgggccttgtagacccagatagtcagatacatccatcgacgtgctcctctattcgccgctccttttattattttttaaaatcatagtaacgcataaatcactcctactctaagtgcttgcttgccactgggactcagactaatttcgggggctgaagtgaagcgaagaaagggaaagacattattctatcattattattggaaaaatgctaatgagtttcgatagcgttaggatattttttaaggaattaaaagaattttttatttattaaaatgcataaaattatattatttatattttttttacaaccttattattattacaccaagaaataagtatcgattttattattttcattggtcattgggcaggcgggcgggcggcactctgcaaagtttaaaaagtacagtgtttcttttctttctttttgtactatcacatgtatattatttattgttattattatttacgtccatcccatgcacattgtcaaatattcctttttcttccccattcataatgaaatgatgtaaattaatttttatatactacgggcggacgtgggccttgggattggaagtgttttctagctgaatgtatgaatgatgaaacattttttattagttgtgttagaatttaagtgtgacgccaaaatctcatattagacaataatggaaaagttctgtaacatataagtgagaaaagatctataaaatttagttttaagattttgtgttaaaggtgataaagtcctatttagatatgaatcagaaaattgagtagtatacatgaagaaagtgtataatttgtccattgcatgcttcaggaatgaagcaatggatcaaagcgtcaccttaatttgttattgttaaacatttctacaagtattattaattcgaatcctgccactgaataagctgacttcaattcctcaaattactcattgataaaggtaatttttttttttataggaaattagcaactattgaaattgatataagcgatgacagtgtgctgccaatacacattcacatcgaagaataaatgcgatgcatggtgctctctagctgaaaccatcaaatgtcctggatacatcaaaaaagcatataccactcacaaccagtcatttgatacagagacttatctatatatgttcaatcaattcaaccttagagaaaattcaatccataatccgtgatagtttctttgaagttatctgtataaaataccatttctttattctatcttatagcaaaatgaataaataatatatgcaatatgcactgacattgtattttaacacgcagaaccataaaatttattgatttttataataattatttaaaaagttatatgaataatgattattcattaattaataatgttaacaaatttacaatttctgtacatgcatattaaaatctgacaaaagatgggggaaggactcgtgcttttacttcatctggagctttgtttttctttgggcctttaatttgtttttgtcagggctatccaatgtaagctgttgtaggcttggttgttgatacaatccaagccagcccacaactataccatctcgcaatggaatcatggaagtaaaactcaagtagctgatttttttactgctctaataattgattttgtttagggaattgattattaaatctatattttttttttcatttgtcattttataaactactattcttacattatttcaatttattcataacaaaaattttaaaaagttgtattttcattatataatatgaaaaaattagttgaatttttcagagtaattatatcataataagagtagttaaaataagtgcatataataaaaatttaaaaatatttttattcagagaatttatttattatttttaaataatcaacgatatttgaaaaaaaatattcttacaaaatataaaagtataaaactatttaacaaataatacatgtttattttaaagtttaggtttattgtccattttctattatttatatttaatgttattctattattttatgtcaaaaaccaattaattaaatataagtgatttaatgtgttaaaattgagattgaatcattttataatattggaataatttttttaaaaaaataatttttgatgaaactttcctcacataagaaaataagattttttttttagtttttgttgaaagaagaaagtgtgtaatgttatctatcctcgtcccctttctccatcgtcatcttctctccccttttggcatacagcatccaaaatcgaatcttcgtttgaaacatggcttcctcttccttcctctgccccgcagcatttaccttctcacagaagccacttcaatccacttttctgcatcccccctctcttctcactctaaacattcttccaaagaaattgagaaaaccccaccaactgagaaccctcatagtggccaaatccaatggcagtgactctgctgatgttcctgaccgtttaatttcagcactttgctacttttaccctttctttgatggcatacagtacggaaagtatgtaatcacacagttctaccctgttcaagccattgttcaaccattggttcctgcaataagagttttcaagagcttcccttttaatggattccttgtgtttttgaccctttattttgttgtggtgagaaaccccaatttcagtaagtatgtgaggttcaatactatgcaagccgttgtccttgatgtgctcttgattttccctgacctccttgaaagagggtttaatcccaaagatgggttgggattggatttgataatgactttggatagcactgtgtttttgttcctcttggtgtgcttgatttatggttcttcttcttgcttgctgggtcaaatccccagattacccattgttgctgaggcagctgataggcaagttctttgaatcaccaatccgttattgagataatttaattgtatagcaaaacaacttcagcctaagtagtggaaaagtttgcattttcacttccttaatagttactatcttggaaagtttctgcaaaacggattttagttgtttcttacattgctggattctagtatgtctttctaaatcaggactgaattattgtaagatgatgagaaacttccccttctccattgttaattgaattcaatattatatctctttggatttactgaatggttatggcttttgagttgtaatgttgcacgcatacatgttaatttcttgtatgtttaacaatcctacaatcagttatcttctcttcttagttcttatgtcgttaggttttagtttgagctattcttctaagagttcagacttcagattggtgtttttctataatgattatgcatagcggaagtaggaaacacatataggggtaatttgctgaagttataattttttcctcttttcttttgctggaagcttggaaccaaattgttattttggcctgttaatgaacgagggaaagtaagtaaatattgaggcaggaaggatcttaaagtgtttagttactttctcacatctgctcgattagtagcatgtttgattatcaaggataatctatgtgacaattttagattttactctcccccgtatctttctagtttcctttatatcctaaaggcttgtttgggtcagcttctttaaaagcacttctaagacaagaaaataaaaataagaaaatgagatgaacttctccataagttaaaatgagctctcaattggctaatttgtagaagttctctcaaatagcttttctaaaggatgagaggacatctacaaattagctatgaagagttcattttagtttatggagaaactcttttcatttgttgtttcttattttcttctcctagaagtgcttttagagaaacatatccaaacaggttcgaaacacatgtagagcagtcgtgatagagtgtgagcctgagttgaatgtgcaagtactaagtactcttgaaatatgtatgacagaagttggttaatagatacgacaagcttttctgagagatacaagatggcgtcaatgcttaaaggttgttggactaggataattatggagatgtttaatcaatcttcatttagcatcttgaggtgttacatggagtataaactctgatgtgtggatgtaaagttccatgtctcttcccaaggttaggagggcctgaggattgacaacctatagtaaggatgactacacatccatggtaacttcagtgtaaaatcaaaggataacaggatgtcaatatgctgtctgttagcttttccttgtgtccaaccaattcaattttgttctcaaatgttgcattgattagttttagaatagttttgcctttggtctcagcgtccactttaaaaagcaatcgggatttcattttttcgttgttatactcctttccttatttatcaaaatgtccctcaagtgggatctataggtatccggctacctatccaagttgatgttgataaaaaaacagcagcatcaaagctgtttccagaggttctattacttgacctcatctatagtatctgtgatagctttacaatactcatctctgctgttcttagaaaatgcttaggtgttggacccttatcaactactctgtataagtcacgcgggaacaatctaaaaaaattgctattttgttgcggtatcatggattcaagaatcataaactgcatataacattcaaaaacaggctctctcatgtgtaatgcttttatttatttcttctcatatacttagaatgacaacttgccctggtccagatttgtatcaggggctctgaagttgccaaagaaattacctaaattttgtgatacgaggactgtaaagcaaaaccatttcatcttaaaatgcctcttcgcatttttgccttttacctattggtagacatgatcacatgcctgcctgaattactggaatgcaacattaggctgaaaccatttctagaatctggatcagtaaccgttagttagctgttttgatcatgaggcagattttctccacccaaaagttttaccttgctagagcaatggattaactgcgtttccgaatttgatatgttgttactctgttaataatgatggagacaacggtgattgcaattatagcagtaaaaatgatgatagttgtagtaatagtgctaataatagtgacaaatatgttactctgttaataatgatggggacaatggttattgcaattatagtcgtaataatgatgatggtagttgtagtaatagtgctaacaatattgataattgtatgctaccactattgtatgcaaatggtagcgataaagtaatggtgatgatataacaataatagtagtagtaactagtagtgacagattgtaaatgtcactataacgaggacaacggtaatacaatgacaacaatcattgtgagaatagtataaacaaaagtgttgcgtagaatgagagaattttattatatgctatttgtttccaatcagcttttccttaaaataactttaattttgaactaatgaattggagttaaattttggagaaaagctaaaattagatgggggagagaatttgttctctccatctccctttcttaaaaatcaaaataaataataaaacttcataaaattgccttcccttcccccaaaacaaatactaaattagccacagcttgctaagaaaaaatatttcttgctatcatattcataccaaaaagagggtattcataaagggaatttaactatatataacaatggatattgaacttggagaggatatggtatataccacatggagctacacaagatgaatatattacaaaagcatttataactattgagtattgacaacaggatattatacgacgataaacaacaaaaagaaggcaaattcagactagaaaaataaaggaggaaaaaagcatgatgaggggggctataattggcagaaccatagaagcagggctttgaccttccccataaggcacataggtgtaaggatttggaggtccataaccataaccataagtgtaaggtgcaggaggggtacaacactgaacacctgcagcaggaggacacttagattggcctgacttgtgtggtgatggtggtggtggagcaccatatatagagtagccagaagatggaggagctggctgtgatggtggtggtggagcttcataagaaggataaccagaaggtggtggagtaacctgacaattctcacaagaagttggggttgggatcacatcacctactgcatccccataagcttcaaaattaaaattggactgtgataaccagagggttacaactacaactgccacaaactttgctccaaacatttctttttctctcaacgttaatgttttacttccttcagactagaaaattcatttataacaaggaaaggagtgtggagccgggagataatgggaattgtatgttggatattgagtaattacacatcaatcgagataggaaaaaaaagagaaaaggaaagaagaaaataacacacaaaatatcttcggttcacccaatgtggactatatccaactattcattatatttcgtcacatacttatacaattacacttaaattataaaaaaatatataggtttagaaatcttaaacatactaattattcgtggacccaacttaaactacaataataaaacacaaattcaacaataatattagatctcaaaaaaagttctgaaagcgttgtcttctatcctattggggtgactcctcaggacatatcttctaaaaacatattatgaatcattaaaaaaaaaaaaaaaactttagaaggaaaacattgttctagatttggatgttttcatttgcaaccagcacctgtttttaatgcggtcttggatcattcgcctccttttcttctacacacgggatatggtgccgcatggcagcacatctgtcatgatattattgaagtaacacacaaatgtcttcctctttgcatgagtctctgtgctaacggattgttaaaattttcaacctttccttttcacttctactttctctttctttaattaaaggtgtttttttttcttcttagaacttatctttttcatcattgataaatgttgcactatcgttcataatggagttcattacattgatgacactaaaagctgaacaagttctttcaagtaaatgcttcttttaactagagatttttctttattgaacaatgaagatttggggggcaaaaaattactatattttttctgccatcttcaaaaaatcactatggttcgtttgtaaaaaaaggaaattgaaagatgaaaaaaaattaaaatgaagacgaaattttcgggagaaaacattgattattttttcttatccaaataaacaaaatacnnnnnnnnnnnnnnnnnnnnnnnnnnnnnnnnnnnnnnnnnnnnnnnnnnnnnnnnnnnnnnnnnnnnnnnnnnnnnnnnnnnnnnnnnnnnnnnnnnnnnnnnnnnnnnnnnnnnnnnnnnnnnnnnnnnnnnnnnnnnnnnnnnnnnnnnnnnnnnnnnnnnnnnnnnnnnnnnnnnnnnnnnnnnnnnnnnnnnnnnnnnnnnnnnnnnnnnnnnnnnnnnnnnnnnnnnnnnnnnnnnnnnnnnnnnnnnnnnnnnnnnnnnnnnnnnnnnnnnnnnnnnnnnnnnnnnnnnnnnnnnnnnnnnnnnnnnnnnnnnnnnnnnnnnnnnnnnnnnnnnnnnnnnnnnnnnnnnnnnnnnnnnnnnnnnnnnnnnnnnnnnnnnnnnnnnnnnnnnnnnnnnnnnnnnnnnnnnnnnnnnnnnnnnnnnnnnnnnnnnnnnnnnnnnnnnnnnnnnnnnnnnnnnnnnnnnnnnnnnnnnnnnnnnnnnnnnnnnnnnnnnnnnnnnnnnncccccccccccccttctctaaccagtcgtaagattattttctgtgtaggaattgttcaaatttcgacacgacaaagccataactatgtaagtcttgcacaacatctaattaatcaaaatgtaaaatctgtggtgttaaaagcaatacagggcaaaaacagagtaattatggtttattaggcgcaatgctaaagttgcacccggtcaaataaaaggaagcctagctagtgtgatcaattggtcataatcaccgtgtcattgcctaagcatgaaaaatccaggaaacaagaacgtgcagctaattaacatctgaaatatgagctgaaatgagaaaccgatatcattcaacttttgtctaagacccaaagcgttgactgaattggaagacttgtccaagtcatggctatttaaatatagataactcaattgctccttgaaatatgatgagataggtcgtggagaaaatccagcatagcacctttctaactttgctaagcataattcattttcatacttgaagggctcgtgcatctctgtaataggatgggcagcatattcctcaaacggcatccactttgtgacaaaaggaagaaatacatgaaaaatgaagtcaaaagaattgaataatatacagataaaaaagttaagttatttatataacaagtttacataacatttattatagttttaaccaccttatctctatcactttaaccaccttatctctcattattgtatagtttttttttaaaaaaattacttagaaattaaaattacaagatgattaccagcaatagctctacattagtacggaaaacatgacttagatatggcagtgtaaagttaattagtcagcatatatgattaagttctttagagaaaagggtattaactatagttagaaaaaagataaatgaacacctcaaatgttattaaacacttagtgggtgagagaaaaatgaaaaaaatataaatattatagagtttatgatatgataaaaaaaaaaagagagagaaaaaaataaaaggtgtctataggatgtttgaaagaatattcttacctaatttaatatggttggagaggctcaagaaattgtaaccttaagcatgtagaaaaattgccaacaaatagaaccctctaacgtatgtgcatgttttaataattcaagaatccacatcattcttatgagttgcatggtcatttttcaactatgcaagggacgtgatcgatccgaacctacgcacgagataattatatgttgctttatgggctaaaaatgtggggacaaaataatcacatgtggatagtggtcatataatccttataaaaattttggtcgcaattaaaatgtctagtaatgcttaatccaaccaaacacagtttggcgtgtaatcatatatattcagcagagtaatccaactttctatcatattatgtcacacaaacttcacgttcacgcaccagaatgaaaatcattttttgtttgccattgaactttgttgtagagagtatgcgcattaaaatgttaggtgtgtgtatatatgtatatatatatatatatatatatatatatatatatatatatatgcgtcgcttggctcatctattagacaattaatactagctagtcctaaagaaggaggcttcatttatgtgtcttgtcatatatatgtcacttcttatgtgatccggccttatccttgcaaaatatctatcatttgttggatgatgagaacaaatactactttgtcacttgatatataaaaattaatgataaactttgttaaatgtagacatgcaaaacatgactcgatcagatatggcaatatagtgtgtaaagataatcagttagctcattgatcatttgtgacatctttacatccaaaccaaataaaagaaagactgtataccttggcagcatcaatttccaaatcttgctttttgatgtcagtagaaagaggacgcaacatgcaaaggaaaaacagttctgatttcccaaatagtgaattatgtgcgtgcctacaaatcataaacatgaggagcagcttaaaacaaaattaaaataagagggaaagaagaaaggcagattttatgagaagtaaatgtctatcatcagtgaaggcaaagccaatttatatatttacattctctaatgctaaaatcatgaagaagaaaaaagggtaggagatcgacagacatttagttcagtttctaaagtaagtttgaggaagaaaattgagacctgaatgccagtaactccacaaattctgtatcaatctgaacaaggaaagtaaatagcaaagttgagttatattaatacaacataagaaagggcatttaattaacgacaaatataaaatgcaacatagcaacattttacatcgacacttactcccgtctcttcttttacttctctaacagctgcggctaaaagctcctcaccctgaagttaccatgttaatttcatgtttctaaacaaattgaaatatttatttttcaacaagtggggaggaaattttggttgaaaatgttcataccgcttcaactattccagtaggtatcttccacaggccagtttcatggaatatacctctttttccctggactacaagcacctatatataagcccaccataagaaagaaagaaaaaagaaaataagagaggaaaagtaattaaagttgtaaaatgaaacctactagttgaaagcaaacaaggaatcaattataaggaggcaaccatatattatatattgttgttatattttgaacgaacctctttgttatcatttaagacaagaccaccgatccttacacggtgggatgcattgggagggattgtgcagcttgtttcaggaataatccaataaactagcattagatagtttggttcagcatggtggaaccggaaaccctcctgcatcatgccaccaacatatatatattcattgaaaattttatatatctgacaaaaatgagataacatttttattgaaaatagtttctctagctcgatcccatccattcatttccattgtgatttcacgataaaattgtcttctgatactgatagtattcatgatgaaactgaatcagtttaatataaattacagaaattaaattaaaaattgaaaaaactgaataattttattaaattaaatttccaatttaattgtgaaaactaacatgatcgaatttaaattaaactcatatgcataaatatattggaaaaaatttaagtcccacatcaactagtctacaactacagataaagtcaaaatgaagtagataaatgagagacaatcctcgtcttttgaactaatttttagagttaagttagacttaaactcacattcaaacaatatacacttttttttttgaaaaagaaaagaaattagaatctgacaaacatttccttcttggcaaaagaacccaaataatacaaattaaataaaaaattacccatttggggctgttttctaactatttaccaatctggggcagtttaaatccgtctctaaacccgtctctaaatccgtcgctaaatcggttagcgaccgatttattagtttttttaaattttttatttgcgaccaaaatagtccgtcgcaaaaattgttagtgactgaaataaaaaccaaaattgacatgttttgatttttgacgtaaaatatcatttaatattatttatttttatttttatttaatttgaaagtatttttagaatgatcttcatcatagatataatctttttttttttacttttatttaatattgttttatttagtatatttttttaattttatatgattttatttaatatattctggatttttggtatatataatttttaatatattattttatttaatataatttctaaattttttggattttgtatatataactatttttaataaaatattttatttaataaaaaaacttttcaattttatttttgaattcgaaaaaattgaatatttttttatacttctcattttttatatcgagactaacctcattaaacacattattctcataactctcatcatctctttcatcctctcataatttgataattctctttcaaaaaaaaaatagaagacaatttcccttttctctttttgtttcagtcaaaagcacacagtcgattaacccgtcatcgaaactacactgaaactcagactttttgtcaatcggtgactcaatgggaattagaaaggatcgtccatctttcatggtgaatgatcaattgtgcgagtaagttggtcaccatctttatctctctgagtaagcacaatgcaattctttgcatttcaatttgatttactttgtctcacgcagttccactcctatttctagagttctgcaatgtttcctcgctccaagtgcgctttggaattaattaatggggtgctacaatttcgattattgtatggtgagtgtactttgggatgagtggaacgaggggtaaagagtggaatgagtgcgaaaaagttaggaatgaatgtgctttgagataaatggggttattatataaaaaatccaaaaaaaattaaacaaaaccatataaaatttagaatatcgaaaaaagttacaatggcgtacgatatgtccttcaaatggtctaacttttgatagaaatgtccgatcgaggtgtacgatatgtcgaaatgctcaaaattgatagaagtaatgaaaaaaataaaaaatagcatgcaattaactgactaaataattaaaaaattagaaaataagaaaattttgggatgttcaaagattaaatcacaattttgaggcacttagaacccttttttgggaaaatttttcgaccagatcccttcggaaacttgccagcgccttctcctcaatatttcgaacgcgtggccactggtttcgcctcaatcggacattccagtcaaaagttatgaccgtccgaagtttatatacgcatcgctccatctgtgcaggactgacacgtgtcacgaactggaaccgcccagcattgggcggcactggaaccgcccaataccagacggttctacccccctggtaccgcctggtattgggcggttccagtgccgcctaatgctgggcggtttcccctgccccagatgcgtaaatagtttgaaaacaaccccaaatgtgtaattttttatttaatttgtattatttgggttcttttgcctttcctttctggatttaaaaattagataatttaattaaaaaatcttatgtagctgaatagatataccttatccttgtacaaggtttaaagtaattaaaatctgacacaaaaaggaaacaataccttaactgcagtttcaacaagattaactaatgctgtaggtaacttgatccaaacaccgcattttgcctgcaacgtatattataattgataagatattaggattaatgttatggtttatttacaaatcatttggatagtatacttttttcaaattcataaatgttgatactatcttgaattaaaagtttttcacattttccggctgaaccttagtaagctgattatagtatgcagatattacatgatctgtttttcaaaatctaagaaaaataaaatgatgaaattgaaaaacctaatattgattatataacatcttgtttctgattgcaaatatatggagcatctaaaaaatgatacaataatagttcatgttttcacacttggtttcctcattcactcgtctctcccattatctctatcctcgattactacctatgatgttatatatataaataaacaggtcttatatatataaaaaaacaaaagaatatttttttatcttaattattacagatataagactactttaatttattgttaaatttctaatgattactttctttttttcataaaagtgtgtgtttttaattgaattatatcaacaaaacaagatatatttattgattgaattttttttaaaatcttcatagataatcttgaaataaaattaaaatttatgacaaactaattaatttaactatttttattggtcttgaagaattaagtaattatttcttgtatataaaatcaggattagtataaaatttgctgatcgagtgaggtgattctgaagcaatcagtgctgtaggctaaggccttcacgggaagcgaaaacatgcactcaagcctatcgcaggatctgtagatgacttatgcaaacaaagggttgaaagaaattaaggatcagtgaagcttaagaaaattttataaacaacgtaaaattgtacacttacaagaagagtaattacacttaattttcacgtgaattaatattttattttatgaaccataatcttaatgaagtacgcattgatatcgttacctgtttcttccattttgaaagtgatgttctaagcagagtaacgaaaatttcagagtccattggcttctccatatctacaatgactcctccatgggcatcatttgtggcagggagaatctcaaaatcaccctcacagaatcggtcccctgaacttgttaagattgacattggctcaactgaatattaagcgtcacaagaagatttaactatagaattatagctagggattcaaaaggctaaagtttcaaagcataggataggggtagaactaatcaatgggaagtggtggtacaaggttgcaatttataatgcaaaaaaatgatattggggcaaacatcaaattctaactgataccaaaaaaataaaatgaaattatataagcataggttaaaagagtgtaatttttggtggagtaaaatgtgtgaattattataaattttatatgcctttgattcatatagataaaaaaaagttatataaatataaatgtataataagtgatatgaagctaaagagaaataaaagagaaaaatgaatattaattaaatctttgaaatcataaagtgttaatatgtcattattcattataactatctgaccacaagcgtatataggccatggaatgcgcagctctcgtgtgagttctcaatggacatgccagaaattgtcatgtgtttctagaaaaagtttactttaagtgatcattattaattaattcatccgcactgtacgatcaaatttatatcacctcaattatactagtatagtaagtgagtatagtttgtaaaattaatatatctccctatttaatactttataattgatagtacaattggaatacacggggattcttaggtagcacatgattgcgcatatattgttgaatgctgtcatgctgggtggggatgtagttaacagtatgaacaagattttgattttccctttttcgaaaggcagaaagttgattgtcaaattaaatttaaaccttaagtctacagtgcaataatacgtgcctcacaactcgcaagtttcgacttgacttaaggggtgtttcacgttcagagtttgaagtatgaagggtagttaatttcatgtagatcgatcgagtatatcatattcgtatatgtaatttgtaagctttaaaactatatatattcactgtatatctttggcaacgctatacccccaagttaatattaaggatagatttttaattattcatatttgaattataaatgcctttcaataagcataaggggttggtgtaactaataacaagtcatacttttagaggaaaaagtgcctatcgaaatacttttaaagacttaaaaaaaatactttgcagacttcagtgcactgtgcacaagagagatttcatcatttcaagattggataaaaagatttttcaagattgtttataaagaaatctatcatctgaaattcagaattataaatatatatggcaactagcgagagatgaataacgtcctcaaataaataaataaaaaggattaatatttctaagacaatgcggagtactaactcattgggctcaccaggcccaaccataaaaaagtattgggatgcacgttatacaccatttatttttctactacagcattggtgtaatagtgcattttcacatttaccccttgtatattaagtattttattttaaaatcattttcactttctcctccacgctgcttcacctgcgtcgatttctgcttgttggttcgtccattcgtcctttcgttctccggcgcaccgtcatggtccgtgatggcattggttggtggcgtggtagtaatcttttctgattggtagtgagatgagttgtctgatttggtctgtgaaagggaaaaggcgaaacaatacggattcgaaaatccgtaaactccatacggattagacaatccgcatgaattttatggattacataattaacatacatgactaagactttcttattataatattattatcacaaattgtattagtcatgtacaagcaaattactttctgaatttttatcattacacataattaaatatagtttttattttcttgtacaaattctttttaaatttgaaattaatacactaacactttcttttatgtttaaaaacatattacactgagatactcttaaaatttttacactaatactccctataaaagagtgatgaaggtgatgatattgataacggagtcccacatcgtgcggggtccctttctacactgccaactattgcaaatataaattatgcagtgccgcaagaaaattcttctgttggtgttttcccagtgatccctccaatagttccaaacccaacaatgggaacaatgatgggtgggttttatggtgatgggtcaagtggtggcggtggttctagtagcagtgccaatgtttgctatgatcatcatgttgcttactttaatcgtgacaactcctttgggaactggtgagatctatgtggcagaagtacaacaacgatccaagcaatgcatttagtgtggttcaatatatagaaggcgtgctacaacatgctcttttatacattttgtttttagcttttcagttattgtgttaaaaaaaaaaaacgtgtgttgttttgtcatatttaaagttgtcttaaaatgtatggaacaattaatatattaagtatggggtctctttttcgtgcccctgtatcaagttgactgaatgtaaactatagtgtgctcagtaattgattatataatattatttagctagagtttaatttggaggtactttcactttaaattttttaaattaacatcaaatctgtgttgacacttcattatttaataaattttactaccttaaaaccaacaatgacaatagactaaattttactaccttataacatcaccacgggataaaagctagtttaagcctatactaacaaattttctattgagaacaaccaactactttaatagatttcaataaatcagggcttcaatcaagaatatccctggctcaatttttatttttttagaacaaacatattgcagagatccccatcaaccgttaacaaataaacttaatatactacatctaactcaaagtcttaaaggcattaggtataagtgttcttcgcactttaagtattgctcaatttatcaattcctgtctatattgcaagactttttcactcacttgttatccaaaaaagttaaaatgagcaacttcaacagtagtatttgcaattcgattacataaattatgtgatatttatttatcagcaaatttacaacacaaaaatgaaaaatcatctgtttatagaaaattggctcagatagcgatgcgcagtggctcttgcaaagacccatgtctacagaatgtaatgaaaaacagtagtaatcatttatcatttaagttcaagtataattgttgctctctgatataatcaatcacttcatccgcagtaaggtattttatagatagtcctcttgcaatgcaatccctgaaattagtgaaaaagacaagaaaattgaacgtctctcttttttaaaaattatcgtcctgtaactcttgaaagtaaacaatgtcatagcattaccttactctggttgagctgatttgatttggaacaagttcattcacaactttgatattatcctaaaaaaatagtggaaaatttaaatatgcataaaagctgagtagcaaagcaattcattctaattcttgttcttgttcattacataacaaaacgctaatacaaagtctggtcccaggaatttcgtttcataactgaatatttgaaaatatatatattttatagtttatatagtactagtgtccttgaagtatccatccatactttgaaggtatcatggttcaagtatccaagtcatacaggaaggtccagtatacacttaataagtagtatccgacacatgtcaaacaaaatgtcaagaaggtgggtgttactgcagcacatgtctcacactccgacacctcaagaaaaagtgtccaaggttaaaagctaatcagtaatcaaggttgagaggaattagccaattctaaccaatcacagcaacaaaaaacgatgtgcgctagcacacacatgtacaaacaaaaagataataaattttaatcattaaatttaaaatccccgtgttgatcgaacatcaacacacctaagtatatgggacatcacagaaggatttcataagttggtctataatttgaccttaattcggtaaaatacaaatacacagtaaacagatatttgaaaatgtccataagccacatttcattttaaacgcatatggggaaataggacaagcttgaaatgtgagataccttattctcattcagaatttcatctttagatatagtcttctcaacatcttgtccttccctgcgaatgcagactactccataatctttgcatatagttttaacctaaagtacaaaaacaaaattatagttcattgtttccacaacctatggcaaattagtattcattaacatatgtggcaattcaatcgttttatccactaatcgtccaatccatcaagtataaatcaaccaatcaatctattcaattataaaaataaaacttaatacattagttgaattggattaccaatttgttattggatagataatgaaccatccaacatattttgcaatccagtgaatcaagtagttccaagttcattacttggacatacgtctttatgagacaaatattggattctatggtatttgggtgtaagaatgtgtacaaatattaaactttgttttagaaaaatattgttttgaaaaaaataaaatataatggatggacctttttttaatgaaataagttatggatgaattagatttttgtaatacataattaatggaccataaatggattcaattcaaaaaaattatccaattcattagtttgacactcctaatctatactccacccatgccttgtatctatttggtaagaaataagaataattgactcaataagcttgttaattctaacaataaaaacacaaaatcaatataattcctctgactttgaattccacgaccatttaaggttggtttaccaaaattattaggtgggacaaggtattttgttccaagaatcattaaataactccatgtgaaactaatctatgataaataatgttagatttttccgttatagtacctggtcaggaatccagcatccaggaatgctaaaagaatgaaggagatcagaaccacagagaagaatgaccttgagggattctacactaatcaatacaaaagaaaattattgcattgttacaacattgtcaaaaacatgcatagaaagaaatgaaaatctagcacggcatttttaattaatgaagggaaggaactattaatgctccttttagactaaatcacatttcagtcaatgaacatatatatatatatatatatatatatataacttttgaagtgcatccatatagcaccatatggaaccaaattgcccatccaatcatgcatccatatagcactaagaaattcccacaaaatactagagtcaaatgaccacctaatgccagagacaggaaaacatgtccaaacattaaaatccatatattaatcatttaaatcacaaagtattcctaacacttagcaccacatttttttaaaaagttcagcagcagtacggattagcattaatatgactagtatttcattcttaaaagagattaagacagctggtgtcagtgtcatttcttcctttattttgaattttaagatggggcaggggagcaatttgaaatggcaattagagtaatgtgatttcgttgaaggcttgtttgttgagcatacctctagataccaaccctgtctcacaaattgaattctggactctggagagaacagttaaagtgcgttgatatgtgctctgacttgcctgcagcagtttatagccggataaaaatgcaaaatattaataaatcaggttagctagagagccaaatatttttcataacacgcatgacatcaaagcactgtctctcacattcaaatctatggataatgaaacttattaacatgcacagaaaataggaagacatgcaatctagctgatagaaagagtaattacctcccatggatcaaccattataaaatctgaacttttgcaggctaaatgacataattgtattcgatgttcagcagatattaggccctatataaacatgcaagcaaaatacaattagactaacatgtggcagtgaaactaatagcatcacttgattaataaaaatcataatttcattaatagaatcatagggtttgatctatttgctgaaaaaagtaaaataaaaactcagtcaagtgtttcagtgttttccacatgccacgcatatgttttaccttatttattcatttattttgctaacaagttttacagactcgcatgtatggatataataaatgaagaatctttttctctctttgcttgacaacttcataccttttttttgtatgcatcattcacaggagacaagtaacctccaattacgcagtagccatctgaattcaacgcatctcttgcaagctctaaggataacacccacaaattttattttaaaaaaataaataaatcagactagcagaaaataaatgaaattaaaaattaaattgcacgtaattcaagaaattaagttaatgaaattccatcaagaagtatgtgaatggaatattcaacatatactcccattcaccttcattaagaaagtagaaactcagagatcatgactcaaggaagctaacaatacaagaagatacactggtatgaattgttcccaggcaaacccaactcttttgaacatctatgtagtaagtacagcatagaattttcaataacaaattcaattatatgtatatggattttataattataatattaattcaagtagacaaagaagcctatattattatataatttatagtgagtatattttaacaatggttaacatatggtttgatcacaaaatgcaaaaaaccactgtaaatggtaaagtgattatcatgcatgcagtgttggctactaccctattgagcaaccattgacttttattttttttcacatgatgtatatgagatctgatatgttcctagcatatagtgctttccaagctattagaagcaaagaatcatccacaaacagtctataattgcccataattgtgatgaattgtgatgaatctttccctgttacatgttatgttaatttgagcatctttatagcaggttaaagggttattgcactgaggaattgatgaataactaagtttgaatacacacaatcgctaagtaacttagataactgaacgtagtaagcaatacacgttcattggaaggaatcatcgagtgcgggtgccctggctacgcttttcttacattgttacaacttggtcatttgttcatatcttataattacgttttaatatttgtcgttacttttacttgtccaaacaacaaatcatttctttaccaaacatttatttatccaacttctagatacgagttataatacaatcggtgcactaatcctcgtggaaatgatatctttctttatcactttattacttgaacgaacggtatacttgccaaattcgcaactaagatcttaatttttttcccctttattcttctacactgaatggaaaaatagaaaagtgtcaaattgttcaataatcaataccttcaagaatgaacttatattcaagatgtcatttattttgttagaggagtggaaggagttaaaattattcagatttgagttttataagcaccaaagaagtatagatgtctcagggcagtagaataacaagtctctgcactgtaaacttaaggaaacgcaactgaccaaacatgcgtaaatgcatgaaagtaggtggattaaagcttccagttgccaccagaattacatatatcttgctgctgttttaatgagagacagaaaaagaatgtcataattaattcataacaaggtcaaaagaaaagtccctcacaaaataaataaataaataatacagacaggaacatacttgctcgtgtttgcaggggagggttcattattaatcaaatctaaagccaatttatccagtggcagtggaacatccatgacctgaaaccattaaaaacaagcaatgctgaaatccaaatgcaaaataacttgtttttttttccttgatggattaattgaacttggaattccagtttcaagctccaaataaggtaagcacgaagagatggagtttcaagctcaaattacaaacatgaatcccaaccatgtcttcctttctaataaattccaaattagtacctattatttgccaacaaaaagcataaacaggtttcagacaaatttttaatttctgctgtgattctaaaaagacattgtagtgaattaaaattacagagagagaaccttacctgggtgtgttgggtgacggattgagggtgctccacgaagcagaagcagaagccgaggatggggagtgccaaataagacgatgaatgaaatgaaaaaaatactacacatacaaatatatatacttgatgagcaccagtgcgttgaacacgaagacgtcaaattccaatactccatgcccataccatacttcacgcaacattgaaagggtccattcaaaaagttggcccaacaatactaggaactttacgttcttgctatttacactccattttatccaagtacacccctgtacccctcctatcaattattcattatacctttttcttaaagatgaacaccccttttactttttagaaatgtcttttcagaattacatatatttattctagaaatatatttttggaattctaatccatagtttggaagatatacttccaaaatagatatattttcaataaaatattatttaagaattaaaatgataaacaagaaataaaacaaatgataaacatttatctgatagctatgtttattaatcttattttcatcttatttttatgattctttaaaccctaagtttgaaactatttttatcatatatttattatataatactttatttttatcattattatataatatgttatttttcttcatgtgacactgtattttaagaaacgttcatcactaatttcatatattacaaaccttaattataaagtaaattgtttgaccatgatttttctcatttaagtgtgtttattcattttttttaattcaagtctacatcaatcattcatactacaatgactattttggttaatgtatgatttgttattatggaaaatgtctttatggaataatgtatatagttcactaaagagttgataatagcgtataccttaatattataaagtcaattttttttaggataaaaaaatgagttgataatgcacatagacatagtgctaaaaaaatgcaaaataaagatacctagcctccacatgcagtacacacaacagccacttctcttctccattgattcattcgttcattttcttgttgattcttggagccacgtcgttcatggccatggatttcactttcttcttcttcatcttgacgttgttattgttgttctcgtgggaggtggcagtagcagacaacgtgagattcgacttcccttttttcactgtcaacaacatcaccctcctcggcgattcctctctcagaaacaacggcgccgtaagactcaccaacgccgcccccacctccagcaccggcgccgtcgtctacagccaacctatctccctcttccacgcctccttctccaccaccttctccttctccatcaacaacctcaaccccacctcctccggcgacggcctcgccttcttcctctcccccaacaccaccctctccctctccggccccctcggcctcccaactgcccccggcttcgtcgccgtcgaattcgacacgcgcctcgacgctcgcttcgacgacccgaacgagaaccacgtgggcttcgacgtggactccttgaagtccctcgtaaccggagatcccatctttgacggcatcgacctcaagagcggcaacaccatcgctgcatggatcgactacaacacccaatacacattactgaacgttttcttgagctattcacgttcttcaaaacccctcctacccctcctctctgtcaagttcgatctttctcatcacctcagagaccccgtctatgttggcttctccgcttccactcagggaagcaccgagcttcaccatatcaaaaattggacctttcacacagaaacaatcaccaccacgttgcaccaccctcataacgtttcggtggtgggaatttcacgttctggtgccacgaagaagcgtgacaagagggttgttggcattgttgcgggttctgtttctttctttgtggctttcacaatattcttggggtacgtttttgttcggagatggaagaatggtgggataaaagagagagagaaagacaagtttcagaagagtggtttcgtggcttatcctagggagtttcattacaaagagttgaagtctgctacaagagagtttcaccctagtaggattgttgggcatggatctttcggaacagtgtataaggctttctttatatcttctggaaccatcgctgctgtgaaaaggtcaagacattctcacgaagggaagactgagtttctggctgaactcaccaccattgctggtttgaggcacaagaatttggttcaacttcaaggttggtgcgttgagaagggggagttgctgcttgtgtatgatttcatgcccaatggaagcttggacaagatgctttacaaggaacctgaaagggggaagcttttgagttggtctcacaggcaaaacattgcactagggttggcttctgtgctggtttaccttcaccaagagtgtgagcagagagtgattcatagggatattaaggctgggaacatattgctggatggaaacttcaaccctagattaggggattttggattggcaaagcttatggatcatgataagagccctgtgtccactttaactgctggaacaatggggtaccttgcacctgagtatcttcagtatggaaaagccactgataagactgatgttttcacaaagaacatgcaaaatatattcttctaaggaatgacaatgaaaacaaaaaggagaacccgatccccttcttagtaggcaatctagcatgagctgtttgccaaataaacactcggaccctctcactagtttgaagctaccatatatatatgttggtatttaagcttccatgttttcctccaaaagcctccactatttgaatattgaaaattattatcctttcatatgcacttgaaacagaaaaactgctcattctatcacctatctggatttcagagtgtcttttattcaagagtgttcaaatccaaactattccaaagtaaaaaatcaaaaaccactaaaaataaaaaaccgaaaaacctaaagaaattgattctttttaaatttatttggatgttttttctttcgcaaactaaacagtttggttcaatttgaactttgtgtttttgaaacggattcgaatcgaaccaaatcataaaatttatattactttaatgttatttattttatgtatatgttatttgagtttcacaatgttatgtagtgttatgtatacgattttatacaatgtatatcaatttttttagacgtctttttttaaaatatgtttggtttaaaattgatgaaaatttgataaatttttattatagaaggtttaacatattaataagtttcgtagattgttattagcaatttttaatgtaatttaatttaaaagttgaaaagaaaatatataaatcttaatgaaaatcaaaccaaccgaatcacgtgttttttaagtttggtttggatgactttttattaaaaattgaaccaaaccgagccatgaacacccttacttttatctgcaccagaatcaatgtaagctatacatttacatatataaaataacgagtcatactttatatcacaattaacacaagttaaaaatattaatatgaaagatttgcacaagaagacacattttaataaaggttgatgagtcataatttttttaatatatagatatattaaacaggtcatagtacatgagacgactaacataatgcacactcacaaacacaggctcattagtgtgtgattattacatgaacatatggcttcttctaaaattatgagcctacttacatttccattagcaattgaagtcaattagcattggtctagataatgtcattttcaaatacccaatgacatatttcgatttgacccggaccaaacccaacttacatgagaatcccatttccctagcctacgttaagcccccaaccaaacactctagagatgaacaagtcatcccacagggtcctgccgttttcataggctacgatcataagaccccgaccaaatccaacttaccggagagccccatttcctaagcctaccttaagggcttgaccaaacacatctgagaaaaatgagttttcccacagggcccccgtcgttttcataggctacgaccataagatcctggagagccccattttcgtctccaagcatatgttttttcacaagagcatgcttaaggaaggaagccttatgttgatgctagatataagggataaattgccaaaaaggtcatttttgccttgttatatgttatccaaattgtctttctcatcttcttagggtaagttgggtttggttggggtcttacaaccataacctatgaaaatggtggaaccatgtgggatgactcattcatctcaagagtgtttggtcgagggttgaacatatgttagggaaatgaggctctccgagaagaaataataaagggcagaaaaactaacccaattaatcttcccatacatcataaaactccctaacaatacaactcacttcctagtgttttcttgtgtgcgtgtttgcaatttgcctgtgtgcaatattgtgtgcgtccgtgcaattttttgcatgcatacgtgcaatttaattcagatcttcagtcacaaatctatacaataatgtgtacattgttaagatctaggaaatcaatacaaaaatacacaaaataattgtagatacgaaagtcttgttcagggatgatgcgaaagcatgtggagatctgaaacctattatctttgtaatcagaaaaccatcatcaatggtgagacgacgattacctcgtcatcgtccagggaaagaatagttccttccatcacaaatgactccatcgatgatcttttccatcatatgctccctttttctcaacatcttatcccttccacaatgcctctgaaaacttaaaacgtagagatagggggtcacgagcaagtcgtcaagatccttcttcgtccttcttccatagttacaatgttggttgtggcactaatttgtgtggagagatggagatcatatgaaagggggcactctagatttgaagaagatgggaaaagaagaagagggataaatttggaaaagtagaagaaatgggaatttgaaaaggctttggcactgtgcacaaggagtttgggtgtggcaccctagactctatcctattacagtattacacagtaacttagcattgttacccactagagaaatcaaagtgcaaatgtagagtaaaataaggctacgcaacaacaaagatattctcgtcgacaacacaaattggcggtttcatagcggcttcgacatctcatttttgcaaataaaagggtgaaagattgaagagaaacggtcttgcaacaacatggggaggattttcaaaatcgatttagataacacaactcaaatacatacaagatcgcaagtcatattcagataacattttacgattccaaaaaaacaaaaaaaactacacttaatcctttctaggtcgtaatacctgattgggtcaccaattttttacaaaatcgacggttcaaggcatgtgaaatcaggttacatgcatgaacaatcctactattgactcaaatcgagctacatgcatgaacgatcccataaattaatctggtccgattttcataacactagcttgagcataaataatcaaaaacctgaataaaagaaaaggtctcaattaagacataaaaattcccagctgtgacagaccaaaaagaaatatacaatgcattttgagatctgattatatttaatgcagtatagaagaaataacatactgctctcaaccaacagccacaccacacacgacctgccacatattcgcctaaatgccaccctcacaaaagatcttcacacccctgccatccaaaaaaagaagtttcacactgtaaaaataagtcttttctcttatcattattttttaccagctccccccgaaccacctatcaccatacaaaaatcatattccagccacttccacagtcaacatcttcatgaatattttcaagctgaaaataagaatacaaatggtaaaataaacatgccttaatgtgatcttaattctttaagagtataagcttctcatcaatttgttgtacagaaacaataagtaaaaaacctcgcaaacctctaccaaaaaagatgctgaaaagagaccttggagatttcggaagaccatcatggttcgaagatcagtagagcaacttgagtgttttaaaaccttaccaacaaatagcatgttctaaagatagttatgaccattgttgtcaagacatataatgttcttggactcaagtcaaaaagcactaaagttatacctgaaacttgagtgttttaaaaccttaccaacaaatagcatgttctaaagattaaagtaaaaaaaattaatttaacctaaaaattatcgtcgaggcagttgagttaatttaatgggcaaatgattatatttatattttagtgtaatgacctaactaatccatgtgggtgtaacgtacattgaacgatttctcattagtagactgtagacgttacatttgataatgtatcaataatcacgtgtattaatattcacgtgctatgtcagttttctgaacttgttgagtgtaacagaaagtctatgtgaacttccttcaactatacatttttcgcaggtttaatttataccacattttggcacgtgaagtttttgttcattaaataaaagtataattcctaaaatgaaatttattttgaccagctgtttgcaatgcgttattgtgataaacaaaaacgtctcataatttatatttaccaaaaacaaaaaaagtctcatcatatatgattcttttttgtcagcatcatttatgaatgttattaagaatcattattagatgtacgttaaatattaaacaacgttcttaaattgtcaaatttacatttaagattaaattaagaatttgatccttacacacctatacattgttttttcgttttattatataggtgtctaaaaacctcaagttattnnnnnnnnnnnnnnnnnnnnnnnnnnnnnnnnnnnnnnnnnnnnnnnnnnnnnnnnnnnnnnnnnnnnnnnnnnnnnnnnnnnnnnnnnnnnnnnnnnnnnnnnnnnnnnnnnnnnnnnnnnnnnnnnnnnnnnnnnnnnnnnnnnnnnnnnnnnnnnnnnnnnnnnnnnnnnnnnnnnnnnnnnnnnnnnnnnnnnnnnnnnnnnnnnnnnnnnnnnnnnnnnnnnnnnnnnnnnnnnnnnnnnnnnnnnnnnnnnnnnnnnnnnnnnnnnnnnnnnnnnnnnnnnnnnnnnnnnnnnnnnnnnnnnnnnnnnnnnnnnnnnnnnnnnnnnnnnnnnnnnnnnnnnnnnnnnnnnnnnnnnnnnnnnnnnnnnnnnnnnnnnnnnnnnnnnnnnnnnnnnnnnnnnnnnnnnnnnnnnnnnnnnnnnnnnnnnnnnnnnnnnnnnnnnnnnnnnnnnnnnnnnnnnnnnnnnnnnnnnnnnnnnnnnnnnnnnnnnnnnnnnnnnnnnnnnnnnnnnnnnnnnnnnnnnnnnnnnnnnnnnnnnnnnnnnnnnnnnnnnnnnnnnnnnnnnnnnnnnnnnnnnnnnnnnnnnntttttgtaattttgtccatgacggttgagaaccacttagaggcctatgcacttcaaccagttagagacctatgcacatcgcgagcgaaagaaggtacatagcttctcccctcactaaaatggaaattccttagacagtcttatctctgaaccctgcatcatcttaaagttcactgccattaatattggcatggaccccaatggtgttgaatggaaatctgataatgcagccaagtgggtacttcttttctaactttcattaccagattgtaattccattcattatacattgttgaataagtccactttctttcttgtccaacagctttggaatcgcttaacaaacatcaaagagaatcacaaattccagaaagctagatggcaaggaaggtcagcgggtagaggactcagctttgggacttcgtcatattaccaatgaaatcaaactgtaacatcatgtaatgtatgtcatttttcattttattgtttctgctgtttctccataagatattcagctcacacatactcattttattggtaatataaaaacttaatttaagcttatgtattttatatatgtaccccctcggcctactgatagttcacttaaaaaattacattcggacaggtacactgtacatttacggagattagtaagtttcattcaaaatttgaaagttaatattaaaaaactacaagtttggcagccgttttacaaatctttaaaagaattcggattaattttatgaaaatgcacgtagtgcttaattttcattagatgtactttaaacagacattaaaaattaaacaaactgttgagatatcaaattctgaatcctgcatggtagtactaagattaagattgctttttgtatggagaaaaaataagaaatcaaaaagtattggtatgtaaaaaaaaaaactattaaattatgaaacccttctttatattnnnnnnnnnntatatatatagtataaaacatgattgataattgtgcccgttaacacacacgacaaacaataattaatttagattctgggttattaaatacatttttctcttaaaacaaacaaaattaacaaaattaacaaaatcattaagaataaaaaaaacaaccgcatttaaaatatttaaaattacaataaaaaggaaaggagaatattttcaatacatatttattatattgatatattaattaggtttaaattgatttttcattgaaaagaacagtcttttgtaaattaacaataataatctgaacaatacacacggtcattaattacgtactagttaatcttattgaagactaatatatcaaatatcaattgtgcatatgagtccctaataaaataaatatgcatgtgtattttttcaaagaaaataattatttcaaactgctactatgccaactcattcataagagaagggctaaaaaaaataagacagatcagagaacagagtcaaattctatttactccttagagcatatagaatcaattttggtggtcaactcttagagtcataaacaagatttgctaaaataaaaggatagaacattaaaatccgccttatttatctcgtgtgatatttagtaatatacattgttgatttgatcatgcttacgtcaaatatgaataaattaacaccactaaatggtccaggcacacatgtacgttttctgtaacggcatgctcggtagtgcacacgtccctataaaatgataccaacaacgtgaggtcttcgcgtgcctgaacgaggaaagagagagagagggttcaagaaccagatcccggtgcaatggctggggtcgtcgacaatcagcacgactcaaaacttggcatacctggtactattacaacaccaaataacccaacacaacaccccttcatttttgctaacatatttccttccttgtcttgtctgtcttatatactcatgagttaacattcattatagtttattttgattatcatgctgtaacatgttatttggttttactatcgggcgtatgagaatgaattaattggtatgaaattattgaaccttgaataaaaaactgcattacatgttcccaaaaaacattatcgtccatgataattctttgccgcttgcgtgaaattgtctggtaccaacaaataattctgtctcgtcggtttttttgtgttattgttgttgttgaagagggatcaccaaccaagtgaaagggagtggtttaatgtagagttttttttttttttttttaagtttattcatgaaatctgcaataaagaatttttcaagttcatccagaaaacttgtaattttatcgaagttggtgaatatttattaacatattctctctcttgatcatagacaagagtgtagagccacgttgaatttgtatttgtggtgttgtttgtgtatgccggtaccctttttatcctttttagtgtgtacgcgtgtgtttttcttcttcaacatagctatacggtgaaggttgtattgtattgtattgtatgtgttgttgtcgtaatttttttaacaaaaaaagatcgaatttggaatctttttcctttcttttttctttcttagttatttaatcaatcttatatgttggtattgttgttgcagatgaaagtgatgaggtagatgagtctcctattgagcaagtgaggctcaccgttccaacaaccgacgacccaacacaaccagcactgacattcagaacatggactctggggttggcctcatgcattatcctctcctttgtgaaccaattcttcggctacagaaccaaccctctctacatctcctccgtctcagcacagattctctctctcccagttgggaaactcatggcagcaacacttcccaccaaaccaattcgtgttccgttgaccaagtggtctttctccttgaaccctggccccttcaatctgaaggaacatgcactcatcaccatctttgccagcgctggatctagtggtgtttatgccatcaacattgtcactattgttaaggctttctaccacaggaacatccatccacttgccgcttttctcttagcactttccacccaggtcgttaccatttcattattatatagtaaacatcaatgatgtgaaaaagagagattgagaaactcataaatgatgtgacgggagatggtgagagaaatagaagaaagaaaaaaaagtgaaaatgaaacaacaatgctatttagtatgaaaaacaccttaaaaattagattacgaaaagtagggattcataatcatacaaggcggggttgttgtgaaaagattttttaaattatatttatttgaagtctcttcttaactttttcacgaaatatttttcgcactaaagagcattttccaaaatgaaatatacgaatataaaaacttgttttttttttttttgtttttgtttttacttttaaggctattaatcaaaataacaagcatttttcaaaatatggttagtctgctaaaccgtgtcgttgaatttttagatgcttggttatggatgggctgggattttcaggaaatgtcttgtagattccccgtacatgtggtggccttcaaaccttgtacaagtgtctctatttaggtatttaaatttaactattctttcttgttcggtgatttttggcgtctttatttttttggatatgtgaatgaaaaggattaattatatgaaacttttaattttgggatattctgtctgtgataatgacagggcatttcatgaaaaggagaaaaggcctaaaggaggaaacacaaggctgcaattctttttcctggtctttgtagcaagctttgcatattacgttattccaggctactttttccaagcaataacaacaatctcctttgtttgcttggtttggaaaaactccatcactgcacaacaaattggttcgggcatgaaaggccttggcattggttcatttggcttggactggaacacggtggctggcttcttgggaagtcctttggctgttcctggctttgccatcatcaacattctggttggatttgtgctgtttatgtatgttctggttcccatttcctattggaacaacctatatgatgccaagaagttccccatcatcagttctcacacatttgattcctctggtgcaacatataatgtcactcgggttttgaatgctaaaacttttgacattgatatggacaattataacaattacagcaagctctatctcagtatcacatttgcattcgactatggattgagctttgcaactctgactgctactattgcccatgttgccctcttccatggaaagtaagctttgtttagttagtgatataatttaaatatagtaccatggataaaacttagatgatattccatagttgtgttgtttttctaactggatttagagtttcacctcgataatccatgcaataaaagatttcattaaatgtcaacatgaattgtagaggtgaaattataattctgattgaaaaataatatctaaaacacctataaaattgtattatctattggtactcatgatactattctccaattcaaaggttggcagtgattcttaagataaaatacaacttggtcaactttgattgcagaacaatatcattcaccagtgtatctaaattgacattcccattttttttatttataataaaccatctaactttatgcttgtggctatctatttgaaagaacgatttatcagatgtggaagaagacaacatctgcactaaaaggacaacaacttggagatgtgcacacgagaattatgaagagaaactatgaacaagtacctgaatggtggtttgttagcattttgcttctaatgattgttgtatctttgataacttgtgaaggctttggcaagcaactccaattgccatggtggggagtcctaatgtctcttgtaattgcgttagttttcactttgccaattggggtcattcaagcaacaacaaacacggtaacgtccaatattgtcaaagtagacaaaagtgttttgcatgcaaaatgcaacaatgccttgtttgttttgtatggctttcaaaaggttgtatttttcttgttttgcagcaagtcggactcaacgtgattacagagttaataattgggtacatttacccaggaaggccacttgctaatgtagccttcaagacttatgggtacatcagcatgtcacaagcgctcgggttccttcaagacttcaaattaggccactatatgaaaattcctccaaaatctatgttcgttgtgcaggtaggtataggatatgataggatgtaaatgcatgcatatatggttgatctaaacaactttttttttaatcagtaaatgttagttttattagaaagttacttttattagccaaagacattgaactcgcaatctttgtcatctttcctttctccttaacaaaagtgatcagacaaacaaataaatagttaattttgtgttcagttggtaggtaccatagttgcttcaggtgtgtactttggaacagcatggtggcttctgacaagtattccacacatatgtgatgaaacaaacttgccagcaggtagtccatggacatgccctggtgacgaagtgttttacaatgcttcaataatttggggagtagtgggaccacagagaatgtttacaaaggatgggatttaccctgggatgaattggtttttcctcattggcctacttgctcctgttccagtgtggctgcttgctcgcaaattcccaaaccacaagtggattgagctcatcaatatgcccttaatcattgctggtggtggtggcatcccaccagccagatccgtcaactacatcacttggggatttgttggaatcttcttcaatttctacgtttacagtaagttcaaggcatggtgggctagatatacttacatcctctcagctgctttagatgctggtgttgctttcatgggtgtcattctctatttttcccttcaaaattatggtgtttttggtccaatatggtggggtcaagatgctgatgaccactgtcctttggccaaatgccccacagctccaggcgtaattgctcatggatgtcctcttctctgacctctattctctaacctccatcatccattcattcatctaatgtaattataatttaatcttatttttaaaaggtttaattataactctagctatgtatgaatttaatttgctctcatttcattttgttaacttcaaacattttaaacaaatgcagtcggtttttttaaaataccactaaattaaaccagttttataaaaataaaaaacttatttaaattttttaaaaataaatggccaaattaaatttattttaaaaaataaaggaaccaaattgaatctaataaaataaatttcttgatttcttttttgaaaatttattcacaacaatattagttaatatctattttatgttaaattgtttcatattttttaattgctcgatgggatatataatgaaatagttttgttttccaaatttttaagaatgaagaaataactaattattattaaaattatcatttttttaattttaaaattccaaattagcttgttactctattcttgtttataaaataaaccattaatatttgaaaactgactattttattttatttttaaaattccaaaatactgttatttaaaaattgccaatttttttaattttgaaatttcaactcattactcccttgtattaactttttaaaataaaattctcagtcttcattacactcttttcggggtttttttaaactgtcgagttttctttgtnnnnnnnnnnnnnnnnnnnnnnnnnnnnnnnnnnnnnnnnnnnnnnnnnnnnnnnnnnnnnnnnnnnnnnnnnnnnnnnnnnnnnnnnnnnnnnnnnnnnnnnnnnnnnnnnnnnnnnnnnnnnnnnnnnnnnnnnnnnnnnnnnnnnnnnnnnnnnnnnnnnnnnnnnnnnnnnnnnnnnnnnnnnnnnnnnnnnnnnnnnnnnnnnnnnnnnnnnnnnnnnnnnnnnnnnnnnnnnnnnnnnnnnnnnnnnnnnnnnnnnnnnnnnnnnnnnnnnnnnnnnnnnnnnnnnnnnnnnnnnnnnnnnnnnnnnnnnnnnnnnnnnnnnnnnnnnnnnnnnnnnnnnnnnnnnnnnnnnnnnnnnnnnnnnnnnnnnnnnnnnnnnnnnnnnnnnnnnnnnnnnnnnnnnnnnnnnnnnnnnnnnnnnnnnnnnnnnnnnnnnnnnnnnnnnnnnnnnnnnnnnnnnnnnnnnnnnnnaataattatagaaagtgctcgggttgttgtaaaaaaggaaaaagaaaaaaaaaactgctcaggttttatttttttcaaaaataactgaattaaaaataaaagacagcattttttattttaaaaaaaattactgaattataaacaaagcgataacaattttttatttttaaaaaataactaatttagatgagaaaatgaaatttgtagtaatagaatgtataataggaacacggtgtattttggtgcaagttaagatatattagttactacaatgttttaacttgagatagtcaaatacggccatcttaaatatatagaaagaagagaaagaaggaaaacaaataagagaggaataatgaacattgcatacgaacaaaaaagaaaaatagaaaacttaaattagtaaacataaaatttgttgtactctttatcatagtttttttcaagtcctcacgtctatcatgacatatcaccaacatagcttccaagcatataacaaatgatgatacatgactatatattagtcctattatggtgtgttgttttgatcaaagatatctgctatcatatggtattttgttgtaaacattttttgtactatcagcaagaaattgaggaaaagagagttttacagaaagaaaggaggaagagggtgtgagtgagagaagagaacagttccactcaaagaataaaacgtattgtcgtgcgtagtagcagttataggagagtcttcagaaactgatgggttttttatttgagtgttgaaaacttgaaagtcgttggcagaagaatttgtactgaatgttaacccatgatcagcgcaaaacagttgaggacttgaggttgtgtacatgagcaatagaagagaagaatattagctgataatttcttgttcaatttaggaacaaaattgactaagaaaaatatcttcttataaattatctattgacatatctattaacatatatttataaaatttaaactaaatagttaataatatattaaaattcaaataatataaaataattattcttataaattataaaatataaattaaatactcgtacaagacaaaaaaaattaagcgagttgtattgtataaacagaaagttgaacaagcttgtactgattgttttatgttagcagggcaagcaaattgtttgcattatctattttttgacttcgatcattgttgtattctatttatatccaattaaatatgttcaaacacaacaaactcacggtggccacagacatctgaaatagtgggaaaccgatttgataaaaacatcctcaccattattggcattgttgcctagtgctactacttgcatatcacacgcttaccaatcctactcaaacttgtacgctcatattgatcagaaaaggaacattttttcagaagattaatcataatcacctcagacaatgatttgggcccgcgtaatcacttataactatcccccactccctttgtcacgtacagcccaattttattttatcttttgaataaaaacattacaaaacataaatctgaaaagagaatgcgttgcaaccataaaaacataagaaaaccattggattaactaagataatggcagtgatggttttgttgtttctaccaagtaacaaagttcgtcacaactcacaaacaaagcaaacaaaaaaagagtaaaaaaaaaaaaatccacttaaatatacctacatccaagggtgaataaaagaaagagaggctctgcaatcaaaatcctttacggacgggtggtaaatatccagcttatacaactgaaaaagcttcatgaagcaactttcctagggtcaaaatatagtccctaaatgtccatcattgagaatccagcatatgcaccataataagcctcaatatcctccacttgcaaagtaaatagcgcaaaaatggagtcaaaagtgccgggatcagttaaaaagccctgggtttagccaatccctgaaaacaatagaataagtattatgtaaagtcagttatagctgcatagataaataaaatactatggaaagcaagaaatactgcaagcaaaaagcacgtacttgcttatgtcatccagatggtcatcaaaatctacaatgtcattccacttctcggatgcaatatagtccaacaagactagatttgctgatggctctttgagagagaatcgattgttcccatctgactgaaccaacttccagttcttagatgtatccctaacataaagctaaaccataagaaaaaggcaatcttggttaatgtaactaacaaaaaaatgactttatatatgggggaaccgtatattatatatagcataaactctaggaagttggaaccatacttatataacaagcagataatgaatttcttcttttataacaacaaaaaaagcgtttttgaaagaaccataagatttgtaacactaagaaacaaatgacaaggaatctttataattagtacgaattttggatgaagccttatagctttgaggttgtagcctgtataatcatgcaaagtgtgcacgttagacaacattattatttcattctcccactcttggaataggatagatcttagtacatatttggtttagcttattttagagaagtttttttttgtttgtttgtttgctaactttcctgacagaacttttgaaaaaaagacaaaaaaaaattatctcccccaaaagagtggctcccaaatatgctgcagtatgtggcaaatcaaacaggaatatgataagcacccaagcacttgggaaaccctgccttaaaagctagctgttaaaaggttggcggggggagagaaccaagccacttaagtacttcaccgaatatctcatactacttgaggtgggatttaggtacctcataatatctgagtccctatcagaatattcctctcttctgacttatgagctatggtgaaaacaagagaaattgaagcatgacattaagcctgaaatttgaattctagccattcaagatgatacaagttacaaccaatgaaaccccacatatctaaatcctagccccctatttctagttaagtttttagaattttagatacagcagttttgtctaaatttagagaatgatgcaccaaaataagccacaaaaacaagacagtcagaccaaccaacataagcaaactcctaactgtccaatgcaaaagcagcaaactgcataaaatatacatattctaacgagttcacaggttttcatgattccattaaaaataaggggttattttagtccactgacaaaagcccttgaggatttctatattcatatagatcagaatggtttctattctatacatttgatggtttgatcaaatgtatcatccaaagaagcccaaatacaattcatggagtggataaacacaatgattattgatcttgatgaaagcggtatccagtactgaaattgctaacctgcattatggcactacggtccttgctctttttcaaagcatcaagcttcttgttatctaactgcgaataattgaataaaaacagaaagacgataaacaaaaggagataattaaaaacaaaattagcaaaaaataaaaataaaaattcaacaacaaaccaatagaacggcggcttggggaaagtagcggcatatgtggtcaccaatattcttcgccacaccaccaagctcactgtcatcagatctctcattcgcgtgaaaatagcccactatgttcaaccctttagcagaaaaatattcctctatctatctcacaaaaaattgatttaaaaaaaaaatccgaaaactacaggcaacacaaagcaaacaaaaaatcaatggatgcccagaagagaaaaagataaacccagttgattaggttgcatgttgattaagaaagtatacgtctttgtgcataattttgtaaattacaatatggggtaagaattgaatgaaaaaaaaatgataaatccctagagaagagagagagggagaaccaggatgagagatatctccaactggggaagaagagggatgtgagagtggaagagagggacggcatcggcgatctcgacgacgtcgttggaagcggagatgcgaccgatcaagacgccgttgacggcggaggttggatttttgagggagtgaaggatgagtttgatgtaagagttttgtgcgatttcgtacctcaaaccgttgctacccatggctaagattctcgacacaaaggtttgaggtttctgttctattctgttctgtcgaacacaaacagatgcagatgcaatcagttggctttttgacaaaaagggataaaaaaaaaaaaattaccatttgggtattttttaaatatattatcgaatgcgtaagtcctaagtttctgattcagaattcgtttacattaacttctgtcataaatatatttatgattgaagaagaaaaaataaattaaaaattataaatatatttataatttaagttataaatatatttacgattttaataaaaaaattcaaagaaatttaagtcaatagttattggactttattatagttcaacaattatttttgccaattttatttatttttttaaattatttaataggttaaattttaaattttacattaaagctaataatcttgcttaatttatgataatattatattatttgtcatatgtgtcctttttctttgtctcacaataataacaaaaaataattatttttttatcaatattactatacaaaactcttttgatggaatacaagagaaattattattaaaagtatttgaagttattctcctcgttttcttaaataaagattgaataaattcattaaaattttggtcattcaggatcaatattattttgaaagaggaatctcaatataatgagaacttgagttatactcaagaataacatgtgaatctaacttatacaaattggttagatcactttaaacgtataaaagtcaaccgcttctacaaagaagtcactgacttaagggtaactgatatggaagtgggacatcgataccatgcgaattgtgatatttgcataactcgaaccatgagaatcgagtgtttgttctcacctatatcgatctctctcgaggacatcataacccctcttagagaaataagtttattgactaaactaagaaggtattcatgccgaacgtgtgacactcctctttggagcacacaacctgtgtgtaatgacaattggataattgatttttcgaccataaacatgatataaattagcaaacattcatatgataactaagacaacactccatcttaagtccatattaacttaaacatcagagtctatgcaagtatccaatgtcttgtatgatctcattctcgtcaccgtgcttcgtaccaaaattatcatcatgatccaatttaggatctttccctaaatcgaatctctatcatctaaactgaacaaatatattttttcataagaaattggtcactaaaaataatttttatgatttaagaacttttctctctcacaccttaatagtgtaaaaatttatgattctcatatatttttctctaattctgatatttgacaagttgatttttttagttctagtattgttgcatggcgtttcaagaagccatgttggttagcctgacctcaaaagccatcctgatgattgaggtattgttgttaccaggtcaacggaactatcccaaaagaaaaatacaaatacattgataaggagaatgataataccctttatcgtataattaagtgaattatatgtaaattatgtttaataattcaagttcatacgagactcaaaaattatttatttgtataaattttattcaaattgaacaataataaaaagataattaaataatttatattttatatattttaaacatataaataaatattgatgtacataaatgagttatacaataatatattattaataaatttttttctaaatatgattaatgtgaaatgaatttttagtgaattttgtgataaaattgtacaattttaaattattaaatggtataacaattaatgtatttttataagtataacttaatctcttcatatacatatgagtctaattttattattctgttaacacaattttttagccaattgattaaaaattatattaaatatgacacttaaattaaatatcaagactttaatctttaatctttatttattattaatatattttttatataaaaataaaaaaacatttttttaattataagaaacatactattatttcattgattaatgtcgatttaaaaagtgtattgattgttattttttttatctcttaatcttttgtgagattcagtgatatatactcaattctcatgaaagtgaatatatttattagactattaagaaaataaggtatattaattagtttgaatatttatcatttaaaaaataacaatcacttataagttttgttacgagtaattttggaataaaattaaaatttatgatattattaattaaaatcaacaaatttaatcacttttattaattgatatgatgaattatgctatttgtctcattataattattgttcttggttgttttaatcaagaaaaattaataaaaaaatattaattttataaaatcaatgttatcatcattaatttatttttcatttttctgactcatgtcattaatatcatataaatgaataaataatgaatcttatattgaaaagataaaataattataatatgatggagaaagtattttataggacttactgttctttaagcctaaacaaatataaaatagatgagattttgaagcagttattatttaaatttaaataaaaaatagacatagtaatggaaatggcgtatattaatgattcaaagtgactgtgttgtgttttggttgtaatagtaaaaatatataagtttggggaacagagacagtgtgttctttgtttcttggttggtgtgttacagaaagatgagcggcggtggtgggtcttcgaattctagggttccgatcccaaacaatgtacgcaaaatcatccaggacatccgtgagatcaccggcaagcagcacaccgacgacgaaatctacgccgtcctccgtgaatgttccatggatcccaatgagaccgctcagaagcttctctatttaggtctcttatcttctttgcgatccgtttcttctccctccctctctctctctctctcccctacttcccccactttttaagcttcactttcactgtctctgtttgttagggttgctgctcaaacttcacttcatcttttcatgttttgttttttaaaatatttattgtaagaagctgatgtgaggggagctgcgtctgtgtgtgtgtgtgtgtggctctttggacattgaaactttgttcaatgtttgggaacaacaaggagattgtgtatcagtgcgcttcagggagataaaagctagtacctttgtaggatttttttttatgtgacgaggaattagctatagtagttggatataataataatctaatgatattattgttgtttgatggtatcttatctctcaggctctctcgctcacacgtgtttcttaactaatggcttcaacactctataatcatttaggatttcttgaaaagaaatgtgttatggcatatttgagattctctctctctctctcttttttttttttttaatgtcgagtgttttttttttgttcacagatacttttcatgaggtgagaaggagacgtgaccgaaagaagggggtaagattctcccgtccctccttacttgctcttgaaagttgagttgctgaatcggattaatttggtgcttcttctgccattgaggggatcaattgtagtggatgaatcttttacctgtttatccactatattaaagtttatttattattttgattgttgtgagctgctaggcaagctttcattgtgtcatgagttgccattgtgtcatcttatgagcactgtgattggcagactccatgttgagattctataagaatccttgctttttaatttttatgaatgtttgaacagttgtggttgttataggtttctacttcctgtctatgatgaagtgtgggatcatgtgatattattggctgagagtaaaagacttgggtcttgttttataattgcctgtatatgttttttacttttttctgtgtgttctgtaattgtatatgtccagttataagtaaatgtgcttgcattgtcccatctttttctccttaatatttttttattagcctgagtattttgtgttatttttattgttgcagggattgagcagcagagcttctgatgagcctaggttaaagcaaggcggacaagggagggggggaaggggtggttctggaggatattcttctaactttcctggtacaatttccgcaccttttagaggtttgactttgggctttgttattaacttacttgtctcttccatttatggagtttcgtttccacaaatggttacctggaaaccatcatttccctgtctcttgaaagaaaaatacttttggaatgccatattttttttaaagatattatcactttgtgatcctttcctcccatcaccttcttactgagttattttatctgaatattaagaattatgcttttgttttgctgcttaatgagccctattacattccttttgaatccagcatgtcatgataaagtacctttccgttgccactattaatcctttgatgttgttttagtttgttttttttcattgattatttttataagatgaactgctttagtgcagaggcctgtcctaagcatcatccaattttttactagtttattgacttgtatgttgttaccctgtcctgatgtctgttgttagatggtggtggtgggaggaaccaagctaatcgaagggaaaatggagtcaatcacattgcagagagaagtcatgctccctctactcagccattttcacagaaaactaagactaatacaatatctcaagctacaaggtagcaatttcgttttatatttgctttaatttgtttatttcaccagattaattttgattatgagaaattgtatggtggaaagaaatggcttatttattccttatgtatttaataaaaaagcaaagcaagactccaaaagaagtgaaagaaaggtgaaagatgacatcactcttattttcctgttttgtgcctaaaattctaaccaaatctcacattgaagtcatgcttaaaattttatgttgattaaacatcaaattgtactcttttttatttcataacttcaatgtttaataataattacaatgaatagaataagtaagaggatacttaatttttgattatttattgataatcaacttgcttgaagtttggcttgcatgatcaacttgataacatcttatatcttatgattgtacacttggattgctaaatacatttatataaagttgtttgttggtgtgatgagaaatacaccagtgtcactattggcttgattacttattcttttttatagttagatatatgtatcctcttcaaaatcatttttcttaaattgcagagtttcagctgttgcaccccatggtgctgcaaatcaatccaatgggaagtcaggtcatgattctgctggccaatctcccatagttagtgttcctgaaagtacttcagctgctaaggacactggccatcaagaaaatgtccaacctcatgcagctgttgttgcagcatcctcctcctctattcaaacctttggctcagttaccagcactgaccaaggaaagtctgtgtcaagttctgatcaacttcaaacttctgtatccgatgtccattcttctttggatcctgtagtagcatcatctgtctcccggagtcttggtgtcagtggtactattagtagggaatttgggagcaaccgaatatctgccggaccaaatcatgttaaaggaagtaaagttgttcacgaagttaatgatttatcggcatccaagaatgaaaaatatgggtccatgaattcaacaagcaaaacaaatgccccacagaagttaaatgaagttgaaaataatcatttatctgaaccctcacaactttcatctccatccccaaatgattcattgaggccatcttccagttctggtagccaatcacctctaggtaaagttttgtttatatctgtttaatcttatgagtaacagggttgctttatgtcctgtttccctcaatgtactgggttgaagtattccttgaattttccaatcaaacaattctaccatatggatactatcattgctctccctactagaaaggaggacaatgtaaattttcagaagagatagtgaagaaaagcccacaggaataggacataggtcaggagaagaaccttagaaactatttctgaaggtattttaattgagaagcagcatgactaagcctataatttaaataagcatgtcacttgtatgggttttgcttttgtgtgctaaccctcaaatttacttgcttagatactcttccatgctcgaaggaatcatcctgacaatcttgagttgcctatttatttatttacttacaatttttctctcaattcttttcaatatatctctaattatatcccttataatgccttttggcgtgttcatacatgtttatgaaacagctaataccgcagaggtttcaacttcagaagtttgtgtgcaatcttcagcagagttgaggcaacatgttacttttccaaaccatttccaagtacccaaggccttaaaaagtggtctgacatttggaagctttgatacttttggcccaagtgaaaagtccaacagtggaactggtggtgacaataatgcttctcctgcccttgaattgagtgacgaagctgcaacttcaaggtttgtaattcatctgctccatatgggcttttgccttgcatatcaaataacagacccctctctgtgtgtgtgtgtgtgaacgtgtgttccttcatgccctttttaatggttgtaatatcctagctttgttctcttatatcaaacttcttaacaaaacaactataatctgccagaaagatagtactaggaaagtgggaaggttctctttggaggtaatactatgccattttccgtgctctttgtcaatcataaggctgagttattatttcttttatgaattattctggctgaataaattgatttttctttgttaccaaagtcattacttgtgtcatggtgtgctcatgtaatttttgttttgatggtatttcttatctggatatagcaacaatcaaagtgcatcgttgactgcacaaggagatcatcttgattatccacattcttcaccttatttgattgaaaagacaccagctacaaatggcaatcctataactggtactgacacaaaggttgatcagccaaaggaggttttgttggctcctgaaggccaacaaattccgactgttcaaactgctcaaaactatggtttgaatttcatttcctccatgttaggcactcagcaagttcaatttgagggaactgaacctcagtcacaagatacatctcgccttcctaactttgttgtaagtttctccatcttttacttcttaagatcttcctctgcttaatatttattaaaaccgaatctccgtgtttgaatgctctcttttccggtttggtgttttgatattggccctttgatttttaaatttctttccattcatgaacttgtaaaaagtaaaaggttaacatttgttttccaaatttactcattcaagtaaaaaggtttccattcataaacttttaaaaagtaaaaaaggtttaacatctgtaaaatgtaaattattcttagtatgacttttaaggtagttattataaatgtcaataaatttaccataaatagtggtttgtaattggatgacaatgtaaaattctttgcaagtgcatatattatttattatgactgtatattttttccttttatatgattctattttttttttttatttttactttgtattgcagaatgcaagttctcaggctgtgtcccctagcccaactccagcactgcagaattctatacctgtgactccacagtcggtttctattttcaggccaccataccctgctaatttcttcccatatggccactattaccctccaatttatgtgtctccaatacaccaatttttaaaccacaatggtttccctcaacaaccatccgctggcagcatgtatctaccagcagctgctgggatcaaattccctctccctcaattcaaggctggagcaaacacaggaaacacagctcatattggaattccttctggatcatttatcactccacctgtaggatatgcgccaggtcaaacagttaatactggaagctccactggaaatgaagatctggtagtgtctcagttaaaggaaaaccagatctatacaacaggacagctggttggtttacttccttttaatgtcctttatttcacccatgcatatttcttgataaaataggaaattttgttccatattttggtccctggttttcaatagtatcgatcttattttgtcaagagtttatgtttgcttcatcagcatgaaatgaaattcttggactttctggagttcctaagcatattatgtttttttttttttttttgctacagagtgaaggctctgcagtgtggatacctgctccaggccaagacatgtccagtttgcaagttaattctctgtataaccttagccctcagggacaacatctcaccttccccccaacacaggctgctcatggggcatttgctggtatctatcaagcagggcagacaatagcttcaccttcaacccttttgcaacagtctcaggctgtggctgggcccgttgaaactgtaggtcccccttcaggatcttatcagcagcctcagcctacacaaatcaattggaactctaatttttaggctggaaaacattttcttggtgcgataatgttcatatgcacacatggtgtgctcagatgcaggaagtatgaacactggcctgatctgaagtgtaaataaaaatgtggccaaagaatgagaaaggaaaattagtaactgtttttggtggggatatttggtgctaacgattttgaagggtgctaattgcaggttttctttttctattttttttattaaatttttgagcctaaagtttatttatccctccctcttttacccgagagaacatttagttgttgctatataagaaacttggtaattcctagtgataatatactaagccaagaattggtaggtgagatataccaatttttccgttctaaattctcacctgtatattacattttgatatcagagaacattgaattatacaattttatttggagcatgaaaattgtgatatctgcttttctttagcacatttctagtctcatctataagcccttcacaagccttacctgattttgcatggaggaaccaacatgtttatggatttattttgtctgattcttttgttttgaaatttttaaattcattttctatccagcatgattctagtttttctttgaacacatccaattattgagaaattactgtttgtacagtctcgtgtgacagctttcttgaaaccttaatagttcatatgcattaaaaattatcgggaatcatagaattatatgcttctgttctcttcaatgttatttatttatactcttaataatttggcttaattgtattttcggttattgtatagttttttaggtgattttggtttttcatattttatttgtaaattttggttcatttgttaacattcatagatgtggagttggaattctggcgtaagtttgatgtgggtcttaatttttaattatttaattttagtcttatttttaaattgtgcaatttggtgcctgtattaacttgttatccattatccctcatttagaaaaaggcaaaaaaaatatgttaatttgcatacttgatcccatgattacgtgagcgtggacaatgataaattatagtctaatgtgtttggtataagttaaaattattaggtttattgtacttttggtttctttattttctcaattttatgaattgcattttttttgcaaatttgatttaatattttaattatgtaattttgatctgttaattaacttgagtatttaatgataatattgatatgatattacgatatatgtggatttgttaatgtgacattgttacattagtatttttgttaaatatttagatgttaatagatgaactcttaccaaatnnnnnnnnnnnnnnnnnnnnnnnnnnnnnnnnnnnnnnnnnnnnnnnnnnnnnnnnnnnnnnnnnnnnnnnnnnnnnnnnnnnnnnnnnnnnnnnnnnnnnnnnnnnnnnnnnnnnnnnnnnnnnnnnnnnnnnnnnnnnnnnnnnnnnnnnnnnnnnnnnnnnnnnnnnnnnnnnnnnnnnnnnnnnnnnnnnnnnnnnnnnnnnnnnnnnnnnnnnnnnnnnttgaaatatgtttatgcttaatattatacataatttttttaagtattatttaaatggattaaaaaataaaataaaaatatgttaattgaataattaatcaaggaaaaaataatattgatttgaactgttaatattaatttgaattataacaatactaagttactaacattattacttatattatgtatatactttattttaacaatttagtcattcaaattttatttttattacaaaattctatagtaatttatcatttgatatatggatgtcattattaaacaacatattaatattttaaaattaatatacaaaattttaaaaagtattaaaaaatctccacataatagttttatgatattaatattaatatcaaaataaaattacagctatacacttgagcttttgtgtgtttatacaagcatttcttacatttttaatcattacatttacctttcttataaagtgttagtataagatttgaggttacaatgtaacattttcaaacaaagttgctctaccatcaaaaacattatagacggtgtaatgattctactgcttgttcactttgtgaaaatgagttaaagcttcgaaattaacgatttgttacattccctaaataatgaatacaatagtcattatctaacttatcgtggaaactcctctgttttttgtggctttccatttgcaggaccatgctcgtttcttttttctaacttaaccagacatgtcatctgttgagtaataagtcattatctcagagtgtgtcagtggtggtcgacgaacttatataagatgtgtgctaaagctaaagcccttgaacatcattcagttgaatagttgataatgctttttttcatttaagaaattaaagagactgatggaattttgtgaaaagcaagctacccttaaaaaatctcaacgaatttccagtattgtctatacataaagtttcgctaattgctaaaaccaaggacgtagtgtctgaaaaatggggtgtcttgtattcatgattcatcatctactatatgacacatacaagggtgctagaggtagtggtagtggtagtagtatttacatttgaatctgtagatgtggtgtcttcacttgttgatttcggcttcgatgaaggctcctgaggctcttgcaaattcaatgatgtgtaaactgacatcccagagagagcaacaacagcaccaccaatgctcacaaccccaggatctgagtcaaataatagataccctcccaacagaatcacacatgttttaaactgtcctaagacaacatgggttgtagcagaagtggccctgcaatcatagattcatagtgtgatgttatctaacattaaaagaaaacaacattatatgtcaaaaaatggtgttggaagaggaatgtaatctcagtaccccaatgccaatgcccctgaccactgcaagagaaaaccaaggagagcagataccaaaactgcagttgagttgttcacatcccacttgaaggataggactcctggtggatctatccacggcatcaatgccccgaggaagaaaactgtgatcggggttgtcttccacatcaatctacaatcacaaaagttttaagtaaatagtttaattcagcacttcttgaataaatgttgtatcatgcttatgtataaaatcgaagagaaaccaaggctaaacaagttgaaagttattttcataaactatgtcaaatgctaatacaaatatttatgttgcaagataagtccaaataagttgcaaataaactcttccaaatgtactctaattaatattacttacgccagagctgtccagttgccttgctgttgtaaagtagaccataaaatcttatttatggcacttgggattatccatgcaattgcaattagagcaccaaataagttgaaccctaaatctgttacagttgcaacagctacacctgctgacacgacagccaaagccaaaacctgcatcattgcaatgacatacatgattagtgcactaaaaacaaagaaagggggttggaatagtcctttttaagatatgtgaaatgctttataaaagagtagaaaagaaaaagaagggaagaaggtaattcatcacctttttaaaatcaatggtttttccaaaaagaatgaactccgcaagaacaatcgttggggtaacagcaatcttagccatttggtagaaaccaacactgcaagagctggattgtcagcaaaaagtaaagttccaaatctttttatcataaagatgctaaagcaagtaaataaacctgttatacttgaggctggtgtttgcaaggccagaggcaaaggccataacaacaccaagtgcaaataaagaagagaatggagttgttttagatggaggggacacaggaagcactgagagtgtcttgaaaatggcaaggagaagccatgcagtgatgtagtgtacaaatgtgaggaaaattggaaagttgaagccaactttacccatcacctgttaacaacatatacatgtaagggtgcttgatcaatcaataggcttgtaatgactatagttgggacattcagttcatcacattatataatacatgatagaaaagaagcaaattgtactgaccaatttgtttgccatgataatcccaacagcaaccataaaattgaaggacaatgccaccactggtccacaatatctttgctgttggcgcttggctccttctgaggttcggatctcattgtagagagaagctctgagttcttccagtgctctacctgatatagtttcaatcattagctggagcgtacaccaagtctcgtttatattggtattgggaacaaggatattggaatcaatggtaatgactaatgagtaatatcttataatcatttcattgcaaaagggaaacttgtaaacattgaatatgtccccaatattactccagggcacaaaattagcttgtgtataaagttaaaatcaacttttgaaaaaactaatactttttacatataagttaatggagaaacttgttttatttcttttattttattttttctcctacaaatacttatgagaattttgcctaaagaagtctcaaataaattgagttataatcagctgtggaaataaaagaagtgcattatagttcaacacttaacagaaaaaaaaagaatggagcataagggcagatgccaaagaaggaagaatgaaaacaagatgaatattagatcaaattcatatacattcatttcaagtgtcattttttttaattggctactgagaacatcaatgaaagttgcagaaaaataaacagagaagtatcagttcaattcaaaatcaaaatgggtctcagaaagtttctaggatcagtaaaaccataacataaacaacagagattatgaatgtaaaaagagagagagagnnnnnnnnnnnnnnnnnnnnnnnnnnnnnnnnnnnnnnnnnnnnnnnnnnnnnnnnnnnnnnnnnnnnnnnnnnnnnnnnnnnnnnnnnnnnnnnnnnnnnnnnnnnnnnnnnnnnnnnnnnnnnnnnnnnnnnnnnnnnnnnnnnnnnnnnnnnnnnnnnnnnnnnnnnnnnnnnnnnnnnnnnnnnnnnnnnnnnnnnnnnnnnnnnnnnnnnnnnnnnnnnnnnnnnnnnnnnnnnnnnnnnnnnnnnnnnnnnnnnnnnnnnnnnnnnnnnnnnnnnnnnnnnnnnnnnnnnnnnnnnnnnnnnnnnnnnnnnnnnnnnnnnnnnnnnnnnnnnnnnnnnnnnnnnnnnnnnnnnnnnnnnnnnnnnnnnnnnnnnnnnnnnnnnnnnnnnnnnnnnnnnnnnnnnnnnnnnnnnnnnnnnnnnnnnnnnnnnnnnnnnnnnnnnnnnnnnnnnnnnnnnnnnnnnnnnnnnnnnnnnnnnnnnnnnnnnnnnnnnnnnnnnnnnnnnnnnnnnnnnnnnnnnnnnnnnnnnnnnnnnnnnnnnnnnnnnnnnnnnnnnnnnnnnnnnnnnnnnnnnnnnnnnnnnnnnnnnnnnnnnnnnnnnnnnnnnnnnnnnnnnnnnnnnnnnnnnnnnnnnnnnnnnnnnnnnnnnnnnnnnnnnnnnnnnnnnnnnnnnnnnnnnnnnnnnnnnnnnnnnnnnnnnnnnnnnnnnnnnnnnnnnnnnnnnnnnnnnnnnnnnnnnnnnnnnnnnnnnnnnnnnnnnnnnnnnaaggcaaagaaaaaaaaaaaaagggtcatataaatataattaataggccatgttgcttaaaatacaatcaatgcatgttaggtgcttctggggaaacagaaaattgacattcttcaaggaggggtttttcaattgcatgaaaataaaaaaagaaaaagacaaaagagaaaagtgaagggaatttactttgtgttccaagagaatttagcatttgatgagagtgccaacaatctggcaacacgtgtttctcaattcaagcctactagaagtgtagctgaagaaggtactactagcatgcaacacctgtctatgatatctggtatactaggaattgatgtaactgttgatttacgggaagttaatgtaacatcatgaattattgttatatcattaggaaatagtcaagccacttgtagcaacgaccgctatgcactcttttagtttaggtaagattgcctaatctcatggatacaacgtcttttctgataaggtatatatcatcactaaacttgatgcaaaagttccatcttactctaactgatccaaatgcagatttgaagatatcctaccaactggttggtaccattaaccgttaaagtgatgcaaacttttttttctcttttgtagattaaactagtattttagtccatatattatatgggataaatgtttatttttatttaattaaatctttaaaaaatgattagttttgaaaatataaattatattatagttagaatttatagtaaataaatattgtttactatataaattatagtttgatttttatgataaacatttatattgtaatataagattattttgaattatttataatttaatttcttttgaaatttataaattttaatttaaaataaagataaaaataaattaaaagagataaatgattaataaaacatggataaatataaaaagagagtgttttgagatggttggcttaatatcttgtgaaaacaaattcttttttgaccttcttaaatcaatttcattttatctttatacatataattgacttttcttaatcatttttctctttcaatttatattattatctttatttctaaattgaattacaatttttaaaagaaattatcagaagttaaaagtaatcttgtatcatcatataattgtttatcatataaatctaaaatataacttatttattaaatatatttatttagtatgatttgaattacaatataatttatatattttaaaatgtttacttttttgtaaattttacacacacaaatttatgatataagaatatattaaaaatacttttatttacgtatgaggattcaaatttatgatataagaatatactaacaagtttagtataatttagattttatttgctacatttggattgatggtatagatagccannnnnnnnnnnnnnnnnnnnnnnnnnnnnnnnnnnnnnnnnnnnnnnnnnnnnnnnnnnnnnnnnnnnnnnnnnnnnnnnnnnnnnnnnnnnnnnnnnnnnnnnnnnnnnnnnnnnnnnnnnnnnnnnnnnnnnnnnnnnnnnnnnnnnnnnnnnnnnnnnnnnnnnnnnnnnnnnnnnnnnnnnnnnnnnnnnnnnnnnnnnnnnnnnnnnnnnnnnnnnnnnnnnnnnnnnnnnnnnnnnnnnnnnnnnnnnnnnnnnnnnnnnnnnnnnnnnnnnnnnnnnnnnnnnnnnnnnnnnnnnnnnnnnnnnnnnnnnnnnnnnnnnnnnnnnnnnnnnnnnnnnnnnnnnnnnnnnnnnnnnnnnnnnnnnnnnnnnnnnnnnnnnnnnnnnnnnnnnnnnnnnnnnnnnnnnnnnnnnnnnnnnnnnnnnnnnnnnnnnnnnnnnnnnnnnnnnnnnnnnnnnnnnnnnnnnnnnnnnnnnnnnnnnnnnnnnnnnnnnnnnnnnnnnnnnnnnnnnnnnnnnnnnnnnnnnnnnnnnnnnnnnnnnnnnnnnnnnnnnnnnnnnnnnnnnnnnnnnnnnnnnnnnnnnnnnnnnnnnnnnnnnnnnnttacgaattggactcaaactacttcgtaacacctttaatttaaattacaatttttttttctttccattcaaaagttacactctctttggttgaattgaaaagagaggagacaaagaaacaagaaaatttttgttgagaccgccaaaaatttgtgttgcctaaattagagataaaaaaaaggcgaaagtaagctttatattataaaaggactaaaatgatattttatttatttatttgtcatggttctctctctttttaggttatttatgtcactttagatacaactttttttttcttaacacatataaaactttcttttcattttctttcttattaaacaattaaaatatcatctaactttaaaacaaaaaatccattctcatttttttattttattttctaaactaaacaaagtatcaggacagggtgcaaattatacaatttaggtatccaatttatactttcaattaataagtccatggattcgtgttgtgtgtgagagtcaggtagttttcattccgttgttcatttgaaaggttaaggatggtgtgttgagtctttgctgaatttttttattgacaaagggagtccacatgccccaagtttccttcaagtatatatattgctccccaaaaatgtaaagggatcaattagtattgctaaccttttctcaaacacacttaagtttctaataggtaaattagtgatggtatgatcatgtttttaatatcatcaaatattttctctcgacttatataagtaaaaatgttatttggtattttagactcaagtataagtaaatctggttataagtaaaaatgttatttttatatcaagttctaataaagaatatatattttagaaataattttattttttatttgagattaataaaattaaataattttaattatcttttttaatcaatatgaaagtattttgtttttacttatatacgaaattagaggaaacataacttaaggataatagttacagtcttacagaagtaataataatttttttattagagatgtgttaaaaaaattacgataaaatgggttactagtaaatttttccttttaaatttcttcaacgtcaaagtgaatattgtggcatgactgcatgaagggtgacccatgaaatgaaaaaaccaaatcaagacagaaaacacagattttgggcccaacacaaccgctctgctatatgtgactgctaacaaattaatttgattaatgctacttgcttcactgtactatcagttagatacatattctttttcagtttttctattcctatcatatcttacatatttttcacttatatatatttctttttgaatcttctgagaattgattgataatatattaatatgaaatgcctttaataaacagctatggctgttaattctctcaacagtgcattaaagttaatattatctaaaattaagaatagttttatcatctattgatcgttaaaaaagtcactaaatcatagactttctacaaaatgacgagaccaaaaatgtatttgtaacatttaatgttacattcttaatatttttttaatttctaattaaatgttaaatgttaaatttttaatttttaatttctaattaaattatgccttgaagtaatggttaacgaaatcaaacttagaatgtttagaaatataatattaaattgtttgcatcaataacaagacaatgaccatgattaattcagacaatattatcacatattactcaaccaaacattaatgagcataattaaaaatcaatagattgaacttaaaacaaggtgtctacaaattatacccgtgactccggttgaccatcccacaacactaaaagagtcgtcaaatagatttactgatttacacatcagtgttttgtgagtaaaaagtatacatgacaaatattagatggtcttcaaagcaccaaacacttgaaaaagagaagtgaatctacaaaatggcattgccgttacggacatgactgttatcaatcacataatttaacctattattcattgtaaatgaactatttttattttttttaatgagacgaattgcatcaatttgatagacacgagattaaagacatgcagacgtgtattccattaatggtcaattacttaccaagccaatttattcatgttcttgacatgttcttatgacaaatgataatggttaaattgaaaggatatgtgagaataacatccatgcctttcatggaccaagaacttgtcatgaaaagtacgtggcccaccaactaaaattctgcctcaatatataggcaaggtcttggtctgatgcagttgactcacgatatatctaattaaactacattattagactacctggcttcaacaaagttctcatagaatccaagatcatggagaaggaaagagaagatgagattgaggacatgtcaatgtcacctccatctattggctccatgcagattgcagggagcaatggctttggtcacatcatggagttcatgtctcaggcataccttccaaatatggacacagagattgacataaaagttgaggattccagtttcgaccaagatccccccctccccatttatctcaaggtagagaaaaatggctaaattctacaacttcattagaattttctttccacgtgcattaggagaaattatagtatggttcaggaccaccacatataaatgatttcggccaattttcacgtggcatgtaatcgagtttttcaatttacaagagttaagaaaattcggttacgtgtggtacatggaaatcggcctgaaccatggacttgtgatggtcatggaccatatgttattttcttcgattgcattagagcaaagtttttctttttatgagaatcatagttcttcatgcaatgctattgaggatcttgatgattaccacttgatattgaaaattgatttcaataagagtattctcatcaacagtgttttaattgtctagttatgattactgtcatttgctctcaaaattctcattaatgtgcagtttgaagatgtagagttcaaggtgagggatagccaagcggcttccaataaccctgtgaagacaatgatgtcaaaagtaggcacacaacgccacgtggaggaagatagatacaagaaaattttgaagagtatcacaggaagcattggccctggtgaaattcttgctttgatgggtccttctggtagtgggaaaacaaccttgttgagagttataggtggaagattaattgacaatgtgcaggggaagataacttataatgatgttcgatttaatccagctgtcaagaggaggttagaaagcttcacagacatcagcatccatgtcatgacatgtgctttgatattttaacagaacataaatatatgctgatgttgcactcttctgtttgttttgttttattttcttccttttctgacttataggattggatttgtgacacaagaggatgtgcttttcccacaacttacagtagaggaaacattaattttctctgcattcttaaggctgccaagtaatatgagcaagcaacaaaaatatgctagagtggagaacactgtcaaggatcttggccttgaaaggtgtgttacatatgattattgaatgctcaaattaggttccgtaaacaaatactgtattttaattgattatttgaatcttcgacaattgactaaaaattagttattatgatttcggagtaagccgcaaccaaagaaagaaataaaactgcttccctgaataatctcttgtataaccatagatgccgcaacacaaaaataggtggaggatatctgaaaggcatatctggaggagaaaggaagcgaaccaacataggctatgaaatccttgttgatccttcactgctgctacttgatgaaccaacttcgggccttgattccacctcagcaaacagactccttctaactcttcaggggcttgccaaggtatcagtaactatatttaactgtcattttgataacatgcttcatttctataaacccacaatttacttttgatttgcctaaagggtggaaggaccataatcacaacaattcaccagccatccagcagaatctttcacatgtttgacaaacttcttctgatatcagaaggctatcccatttactacgggaaggctaaggactcaatgcagtacttttcatccttgaggttcatcccggaaataccaatgaatcctgcagagttcttgcttgacttggcaactggacaagtgaataacataagcgttccacaagatattttgaaagatcaagaatctgctgactcttcaaaagccgttattaacgttagatttatgtattatataagtcttatatgcttgttcatctcattcctacttaataattgatcctttattttatgttagtatctacaactcaagtacaaagacacactggagccaaaagaaaaagaagagaatcatggagcagcaaacacaccagaacatcttcagctagccattcaggttaaaagggactggacagtgagttggtgcgaccaattcgttattctttataagagaacattcagagcaagaagcaaggactattttgataaattaagactagttcaagcacttggcattgcacttttgttgggattactttggtggaaatcttctaccaatacagaggctcaagttagagatcaggtagtttccatgatattgatttcaaatttttcaaggctgagctgctctacctgtctcttcaacattaacattagaatgaactactatttttggtgcaggttggtttaatgttctatatatgtatattctggacatcttcatgtatttttggagcagtctatgtctttccatttgaaaaggcctacttggtgaaagaaagaaaagcagacatgtatagactgagtgtgtactatgcaagcagcactctgtgtgacatggtggcacatgttttctaccctacttttttcatgttaatcttgtacttcatggccggatttaagagcactgttgcttgcttcttcctgactttgttcgcggtgcttttaatagctataacaagtcaagtaagctatgttgagacgcataatataagtaaacgacgtgttatcatttttgtttgatgctttaatgaatacaatgttgttaatagggggcaggagaactatttggagctgcagttatgagcattcaaagagcagggatggttgcttctttgatactaatgttattccttctcacaggtggctactatgtccaggtatgtatgctatgcacaaggagtagcaacattgtaatttgtatgcttaattgcaactttgtctccctactttctcaatttcacgaattttgcctcccaaatctttttttttctcgtgaatttaatccctaatattttagttgtacaattttggttcatatgttaatgcattgtcacgtcagcacatccatgccttaacatacataaaccaataattagtttgttttggaagtgacatattcatgcatgatcatttggtaagagttgtactcattttttattcaaaagctagccttccttcacagaacgcttgattgtgttgcatgcagcacgtaccgaagatgatgcattggttgaagtatttgtcgttcgtgtactatgggttcagactacttctaaaagtgcagtattcaggagagcaaccatatgagtgtgaaagcgaaggagggtgcaggacactgcagagttcaccatcatttgacactgtagacttggaaggaggcttaactgaagcatgggttctggtagccatggctctatgcttccgcgtgttagcttacttctgtctccgcagaagaattgacatttgcaattagtctctcatgaaatgaacatgtcttctatgctgttgttaactaaacagcaacatttgagaaaaaaagtgtgtctctgctggtgtctactgtctagttgccttttcaggataaacagtagccgaaaaaacgcaatgcaagaaaaaataaatactgtattcaagctctaccaagtaacaaccattttaaagaaatgtgcttcataacagagttacgtttttttacggcttgatgcttcaatctacaaatgaaattaatgtttttttttcttccatttcttcttttgtaacatagattagttgacccatataccataaagaaaagttaaaataaaattttgatctcttatttacatattttatttcagtttggtctcttaaatttagaaagctatcactttaatttcttaaaatgtctatgttaaactgaattgaccattttattagtttctcatactaatttattaacttagtaatacgtggcaaacggtgaaaaatgtcatattatataaatgtatgtcatatcaactaaaattgacatattagtgacaaaaactaaggagcaatttgttctaacaaacattttaaaggaaataaaataaatttttaaactttagcaaccaaattaaaaaaaatgtaggtaagaaactaaaaatttattttaaaaagaaaaaaagtagctgccccatactttaacaaccttttagttaaaatacattttatttgatcattatggtacattaaatattttaattcttcttccccttccgttaaattaggtaatttttcacattttactatagaagatattagaaaaatgatcaaatccataggttgatggcagaaattccacccccaaaaattatattttgattgcgcataaactatatcaattatacttaaaaaaaatagataatcctagtcattcatgacattattgctacaatctttgttatagaattggacataaagttttcacctaataatacgactcttttaaagccttaaaaaaaatctaatgattggatgaattatttatcccttgatatatttgtaagatatataagattcaattttatacattagttatggattagacccattgaattttgtctcttctaatatttttttaaaataaatacatcttaatatttatttaaataaataaataataaaaagtacctattgatctcatccctaaaaaaataaattttaaatttattgagttataattcaattcttccataaattgctcttttaaaattatcaataatttccttatcattttcgattaaaagaaaagaattacatgttaatttttcacttaaacaaaagaaaaaaaaatacactttacagtattgttcgtgagtagagtaatttaaagatataagataaaactattagtgattacttaattaattaatggcttacgaaagctcatactaatttagttatgatgaagattgggatgacttgcgggcacgtgaagaatgcaatgccgcaatggaacacaagacaagacacgaacgaagccaagtaccagttcttcctctcttttttttacaatcttttcacttcatattcatagttcgtactattacttcctgtcagtttaaaaagctgcagtgttcactttttgaccacaaaacttggaaatcaaatgatacaactattactgtatctctttcttttattagccattcaatcctgactgacagacacaacatccttagccagcacacacataacataacacattcattcactaacattatttgcacttcacttctatttctcttctgttctttgatggaccttgtcccttactctgaccctaactctgccaccaccaccccaccgtggcacgacatgttccgattcgcatccctccgaaaacccacctccgatcctcctcctcccccgccgccgccgtcaaatgccgaccaaaaagtcaacccctccggcgactctcagtctcaggcgcgcctggccctctacatagccatggcccacgccgggctcgccatggccattctgatcctcttctctctctacaaactcctccaacagtacctcaaaccctttcaatgggccgttctctgttccatccctctcagactcattcaccaaaccaccgtttgcttttggtctcaccctctcaatctaggcctccttcacaccctcctcgcccttcccctcaccgtcttcacgctcttcattacaacccttgttgagattcgtgaagcttctctcagaacccttctcaggaagccaaagcctgagaatgagaatgacaacacaaagaagcgtagcggcttttccaccgtgcttcgtttgctcttgtcctttggggtgtttgttgctgcttatgagaggcttggtgctattgggtctctgtcacttctaggattaggctttgttttcagttccaagaacgtggatttcagtttctcacttttctttccctctggtgcatttttcacaagaggggtattgaagaggttgaaaaccgttgtggctgttgggttgattgttggcatgattgttgggttcttgagtggggttatattcttctcttacaagattggcggcgaagggaaagaggcagtgatttcgctgaaggttcgagtggaagagaacaattacgctgagagaatcggtgtgaagaagtggatggaggagaatgatgttgctgggatggtggataagtacactagtcagttctatgagacggtttctgatcagattgatgggttggcaatgcagtacaatctgactgaatttgtgacggttattaagcagtttgtgataactgctcctgctagtgctagtgctaactcttcttcaacggattcgttaatggtgccttcaccatacacagaaaagctcttgagtttgaagggtagggttaggaataaggagtggggggagatttatgcagaacttgatacccttttccaagaccttataattactagggaggatttggttgagaaggcaaaagggtatgcggttaaagggatggatgttggtcagcgtgttttggctagtggtacaagtgtgcttggaagtggtgcaaagtttgtgatctccattttgaattccatagtctctggtgctgcggaggttttcaattttgtgtctcaggcaatggtgtttttctgggttttgtattatctcatcacatcagagtcaggtggggcaacagaacaagtgatgaacatggttccgatgtcaaactcggccagggtcaggtgtgttgaagtgttggataaggctatttcaggagtccttttggccactgctgagattgcattcttccaaggatgcctgacttggcttttgtttaggctatacagaatacatttcttatatgtgtcaactgtcattgccttccttagccctttgctaccaatatttccatcttggcttgcaacaattccagcaacactacagctggtactagaaggcagatacatagtggccattttcttgtctgttgctcaccttttcctcatggattatggggcaactgagattctggaagatgtgcctggacacagtgcatatcttactggactgagcatcattgggggaatggctttgtttccatcagctctagaggtaaattgttacccctccatgttttgatgttctgatatttttctttagtgtttaatttttatgcactctcatagaggtatgactttattgtaaaaaaattaataaacttatttatcatatatgacaatgtaaaaaccctttatactaccagtgtacatagactatttactcttttcttactcaatttgaactagtaatagtcttacattgtcattttttagattaacatgaaatttccaacctatatttgttctagaatttagactggtttgcctgcacaacttcgtttgaaatggttatctgcttttgtaacttttgtgtgtgagcatgtgggatccaatgtataggtgtagtagctcaagtgtgggtcggcttattagtgaacttgtatggatgcactttccttgtatttcataacatttgctgaaggattctgttgttccacagggagctattttggggccattgataactacagtcatgattgctctgaaggatttatatgctgaatttgttttgggcgaacctgatgacaaggtaaaggagaaggcaaattaggtttctatttgtgtctatgactgtatatatttgcggttgaagatgtctgctagagtgctaatacattgttctttgccattctagcagtggagcctgtctaggccgtcatttgtttgtacttattcttttcatctatatcatttgattattgtgattgataacatacgagtttgttttcctcttctttttcctccattttaagggtcacaaatattttcacttggtggctatgtttgatagctgcaccgatgcacgtgcacatctagacccaccagctccacacactttataaaataataatacacaaatattttattattttaaacactttactaatatatttttgtttctatcacattataaatcttattaaatttatatatttctttttctctatgggtgtttaatgggtgataggagtattcatgtaacaattttccactttaccatatgcttcctactgactatatataaacaaaaataactaatttcatactattaagatattaagaaagttaattgatataatttaattttcttatcaaataaaaaataagattatttttaaaatattatttactggaacttgttatcatgaataaaagtcattgaaaataaaattaaaattaaatgaaggatattttaaaatgataacattaaatatgataaaatagttaaatttacttatatttaagtcgaacatataagatattttttttacttttatatctgagtaaaaaaaaagtataattttggagagtatttacttttttaggtgtttcataataatttgggattgttgattaaactttttccataattttgtctgatatatatagattcacaaccttctatcaatattggtaacttaatttgtagcggaagctttgcattgcatattatcctcttgttgcatgtcatagctttaacaattgagctatatcaaggtatttgccattctctctctaatccgaatatttgttaaaaaaaatcaataatagaatagaataggcaaagtgaaattaacaaacaattcagctatataaaacgaattgttattattatttggttacaaatatcagctctgtattaattggatgtattagttatcatacttaaatatatttttaatnnnnnnnnnnnnnnnnnnnnnnnnnnnnnnnnnnnnnnnnnnnnnnnnnnnnnnnnnnnnnnnnnnnnnnnnnnnnnnnnnnnnnnnnnnnnnnnnnnnnnnnnnnnnnnnnnnnnnnnnnnnnnnnnnnnnnnnnnnnnnnnnnnnnnnnnnnnnnnnnnnnnnnnnnnnnnnnnnnnnnnnnnnnnnnnnnnnnnnnnnnnnnnnnnnnnnnnnnattgacatgttaattgtaaatttcaccatctgatagtaaacatactgaggattttaatatcaaaaaatattcatgatcgaacgaaaaattcaaaaatattttaagaatcacttgtatatataagtctgactgttaagaattacaagaactaaaattaagaaaaatcaaagtatactttggacaaaaactatttttgtctaattattaagagctactattactgtcagacgtaaagtctaactgttcatactttttcaatggacctaagaaaatatgcacataagtgcacaaagtttacgttggatcagatattcacaattcacatgtttaaaatgtccagaataattatttttaagttttttttacatgcaggaaaaaatgtttgtttttacataaaaagagtttaattttgatacattttagtaaaaaaaaattacaaatttaaatgattaggtttgttgaaactaaattagttactacatttgactttgttgtaattccaataaatgatgatataaatgtagcaatcagtgaggacataattacaaataaggattaaattgattttgtttttgcataatggctaaattgaatttaaaattgatatttatctatgtgttgtgcgggttaaaaatatacgctacaattctaagaaattagggattacgtaaataggatatttaaacatgttttcatttaaaaacaatataatataaaattttaatatataagtaggatatatgttattagtgctacctgaggtgtaaataattaagcattatcctgaatcgaaagagcacagcacaagaaacacatgggatgggagtgaggagtctaaataacactcacggaatttttaaatggaattttgtaacaagcaacatgtgtgtcaagaacttaatatcacgcatgtatatgtatgtacatcccatggcctgcgtagacccaccaagttccttttagaacaaaaccttaagtcctattacagtattatttgatgtattatgcagaaactttcggttgaagttatttctgatttcttttgttatctccaagagcttaattggttcttaaagatcacctcatgatcctacctaagggacacaatatgataaaactttcaaaaaatcttattaaaaatatatggaaaaggggagaataaattatatttctattatataaaaaatgaaaatagataaatcaatataattattgtagtcaattttgttgcagaccagttgttgtaattcgttgatcattaacttgaacatcagtttgaaaaagaagttcaaatataatctattatgcacaatattatgatagacgaagtcggtatattaagacccccgctagcaacaacttttttttgtccttattgtttaatgatgatacacttaattgacaagagaaaacaaatacgtgctgtataattatgtcttgaaatcggaagctgcatgtatatatgtgactgacttttactcaattatattgaatatttgtaaatctaacctatccaactcaagcaattgtttatacagaatgtgacatgcaccttttattggagaaccatccaaatgtactactgttcgaagttggtcaaagtcaaatagtttttaatcaagatgttggagttttgtaatttttacaataattattgtaaaagtaaattctaatataatttgtgattgatgcacagcatatggtaaatttggtttagaagttttgtgaatttatagttggtacgaggacaaccggggcaagcacatgaaattttgaggatgattttgcatacttttctaattaacgtaatcaacctttttacttcaactttgaagccttttgatttctccgtcgtgtatacatgaagataagtttcgtgttcaaattcaacagttcccatttcttatccattttccgaaagtgattgctttcctttgcaagatacgtcaacactaacacgttgcatgtctcaccgcccaaataggggtcaaatttgatcctaatacgtcaaaacaaacttaatcgacgtcttttatttgttaattatatgttttctttggaatatagccacttcagcaacacttgccaaattcttaatggttaacgcatggtttaattttattcattcaagtaaccttaattaacacgctgattaaacatctcgctcattccttatagattccctatctgatttccttttatgtagtagctcttcagcatttattcgtgaggggtaaggccacttattttatgttgattttaaacttgacggaaccttttttcttttttaaaaattaaaaattaaaaattaataatgatcccaaaatgatttttctctgatctatttagaactaaggatcatataaaatgtatatttgaaatttttacactttgctccattcgtaaattaacaacgcatgaatttgacctttagccgtcaaatttttggcctctaatttaggctttcccacgtttgatttggatttnnnnnnnnnntgtaaccaaaaaaatctcatgttttttttaaagtaattttaatctctttaattagtttatgctttttgaatgactaaaacaaatagactaacgctagctctacaccaagtgcatgtatgcaccaaaatgaccacatacgaagaaatagaaaaatcaatagaaaaaattaatttaagatgttcaatgcataggtctatatctagtttccaataattgcttagcaatatgatcaaattttgtttttacttctgctaaccctaatttctcctacattaatcagcggatggtgacccattcggcttgcgtgatcccacaagttaattttgattctagaatattagttatggcctaatacgactataatttatgagtcaaactaacgactatagaaataatcgcaactgatgttctgttagccaaacatatttttgacagacctataatattagtaaaaataaacttattcactgtagcaaaataatattggtattcatacaactctacattcaatcatctttagaaaccatctagcggttccttattttcatctgaaaaaaaatctcggtggcgctgtttaaacttaggttaggccacctatgaggtcagtggcggaatcaggaaaaaagtgatagagaggcaaaaatttaacgcataaattgacaatgattcatagaaaaaaaaaattctcaaaattaaattattttatctatcaaattaagagtaatttaaaatgtaataaaaaaataatttaaaacctactaaataaatgataaagcatattcgaaaataattaacatagttgaacctgtaccaaaaaatcaatgtaattaaaagcaattaatctataatagctaaaattatttatagcatatgaaataattaattagttaatatttgaaatcaaattttattattttaatttatacgggtgttgactagataatactggaatctttggaaaataagatacagatattaccaagaacttctggtagaaatataaaactataaagtgatcatcaacgtaaaaaagaagaaatagtaaaattcatcgagagggaggggggtcaatattagaattcatggggatgggtgacagtaaattttatttactcggagggtgactgtccctatagcgaagaacctagtttcgctcctgtaagagtctatacaattacaaaagatttaatcttactcttaattaaccgaacttcaaagatttttcttcaattagaacaatttacaacaggtaataaaaagaagaaacttaggagttgtgtggttaatacgtaaaacatagcaattattcctagacacaaggagggccacactactccaatgtgacacaaattaactgttggttggattaggtggccaaccgtttaccacataatcccaaaatatcaactgtacccgccagaattcaaatcatgttttatgattcatttatcatataaagaattaaaagattgaaattttgttggccataatgtaaacaaatgcccagcgtatagtatcagataataacttttaagtcttagcccactttatttcaaagagagttagacttcactttattttcaccaaaaaaaataaaataaaaatctgtgtttgtgctaatcttttaatatataaagagacaaacaaacaatgttaaaataacttttgggtccctcgttttatttttttagattcaagttaaagtttcagtcaattaacaaaatattggtaagaagacgaaaaaatggacattaaacttatgggaacaaaacaaaaacaaaaaataagattacggatcaaaatattttagccgacaaagaaagggagagaaaagaagggaaattgaagtccaattgctttctgagcttggcttcatataaaaataaagcctagaggaagttggccaacggttaagttccctccaaaccttgtgattcccttcgaatcaaagcaaaacttagcagttcgattctttgtcaccctctgagacacaacctcaccttcctgacatatccttcacaccaatcttcccttcctcctcttctatatacacttcatcagctccatcccctcttcatatttttcctattcttaacctttctctacagtatgtggttgctgaaaggatcatgttattgaagctttttgtgatatttgtctgattatgttgctaggagttaaaggtggtgcagacccagaaaagatcttccaatcaaggtactagttccatccatcaacaaagttgccaattgggatgcttcaatttcaaggttcttttgatgaaaacctgtgcttttaagaaattaatactgctgctggattcaattacttgatctctgatacacgtcttggacaaattctcaacacacacaggcaaaagaaaacatttccaatgaattctaggtgcttccttgttcatccacaacaagagtatagcatggttccattttcttcaaattctgcctcagaagatagagtggctagtgctcgaaacaggcctccacgtgtcacccctccttcctatatggttcggatggccatgagaatatctagagccagatggtttgcctttttgagaagagtttttcattaccaaaatggatcaaggtccaaccttggctccaaccctttcaattctagcacttggatgatgctggagtttattgccttgattctccaaataacgattacaacgttcactttggctatttccaagagggagagacctatttggcctatgaggatttggatttctggttatgatattggctgtgttcttaatctgcttctactttatggacgctaccgtcaaatttatctaactcaaggagattctctcagcctttctgatatggaacagcagagaaacaatgaagaaaccaggtatcctgtgcacttcaaccttcaacaactttatttcagacaattttattattaataatgggtaattaattgtacttattggctatattatagtgtactaatgcatgagtatgctctaaaatttgctagaaaagcttgataccatcgttttgttggttaaatataactgttatataaaaataaattgttctccttgaattgattataaataatatttggacaaaacaagttggattgttagaagataggaaaataccaagtgtcaagtaatcataaagttatcgtaattttaatttatccccttaaaaagagcttggaggaatcaaataccctcacatacctttttcactgcgatcagttcgtggcatttacttttgaaagagtagaatcttttgtttattgcatttttttttatctcgttgaggatataaatcatgtgaaaattgaaaagactaatatagaagttttaccaacttctttttctattaaaatgtattgtaatttcaagttgacgaaaaccatatccaagaattaacagtgccaattaggaattaaaaaataaattgtaaactctatttgcattatattgtctgaaataactttcataaagtcaagtcagaagtgtttttgagagcttctctactggaaataaatgtcggacaagtcattgactcaatcagagaaacaagtttttgtttttatttttagagccatgcaacttttttttggttgaaatttgaagttgtaattttaatttgcactgatagtacaggatgtcacacttgatgaataaatgccggacttcacttgagcttttcttcgccatatggtttgtgatgggaaatgtttgggtttttgactcacgttttggatcttttcatcatgctccaaagctccatgtgctctgcatcattctccttgcttggaatgcaatgtgctactctttccctttcctactgtttgtgttgttatgctgctgtgtgccactaattagcaccctcctcggctacaacatgaacatggcctcttccaataaaggagcttctgatgatcaaatttcacaacttccaagttggagacataaagaagccggtgtagagttagagcttggcaatggctctgaaggctgtaaacaattgatcaatgaagacccagtaagtggtaccattagtagatatagactaggccttatttggatagttttttctacaagcacttttactagaagaaaatagaaagataaaataaattaaacgtctcctataaattaaaatgaacttatgcacttcatgtgtttcatggagaaatgtatcaaaatagagctcaagtaatgcaaccctaaaagctaaatgagacacaaaaatgacaagtgtgttgtttactagcccttgacttgatgtacagctagctagccacttaacagctagtaatgtagttgtgcatttttaccctcgatttggatgtatgcttttaagttccattcattttaagatttgtcatatttcaatttctattgaattgatagatttgttatgttctgatgtgcttacaggaatgctgtatctgcttagccaagtacaaagacaaagaggaagttagacaattgccctgttcccatatgttccacctaaaatgtgtggatcaatggctaaaaattacatcatgttgccctctttgcaaacaaggattagagaggtagaaatagcagaaacaacagtcaaaaggattaatcttatttggtcacatgaaaactcttgatattaccctcagttttttcttcttcttttccttaaattttggtttaatatactttacacgtgtcacttgagtgagtttgtatatgtacagagtagctcaccagtgaccaaaactataatgtgtacttggttgtaaggaatggatcccataaccattcaaattagtgatttttcttgtattgtcatctaaatactgtgagataagcatctgcatctatgtaggggaaaaattaaagcaagtaatatattcgttccttaattcttaaacaataaaatgtccattatttagggttttttcccctaaaaaaattgccaaaaaaaaatgtccactcttttagtatagtctttgtacacatgctacttttcggacttctaccagaatattttgattgtcattgatgtaggctgtgttgatatcgaatgaacagatatgatttatttttcatatctaatattaaaattcacaactaaataaaaccaattaccaaataaatttatccagatattgttattcttgtcctaaaatagcctaaaagttgccaaactaacccaaaaaaagcacaataatatgaagcaacaagcaacaagaaggcattatcgctgtaaaattagcttaagattgtcaacgtgacaataaagaatcaaaatggtgaaaaataaagaatatccaaaagaagtacagcgtcacggaagctgtaaaattattgccaatttgtcaatcatatcaaggaaaagacctatcatagtcatagtatctcatgtccaagtaggttgagaagaaaaaacgccagcagagctttttgagaacgtgtggccataaattgttgattgaataaataccacatatttgaaacaacaaaactgggttaacgcccaagatttgtgctatctaagagctgagtttttctgaatcttcagaggaagcataatatcatattaggggccctccctctctacattgttgcagagaatccaaagcctcaagtgaactaagcaattcatctgcggaaggacatcatattttgtacacgccttctctactatctaggtataaattaatcacttatatatggctccacccacaatcaacatttacaaagtatacatacatgattcctagagggaaaccaatcaagcatcttgtcatgaaacatgatttaatgttgttgttatgtcattagcattatgcatgtaccatgtctttaattcgtgatatcttgcttcataagcaaatcatatagtagtattatatagcacacatccaaagaaaatcataacacaacaaggaaattaagataagcgcatcacaaggtaactatctctcttctttgatctccatcatatgcatatatgtccttagacacaaggcataggacattattagcagttaacacattttttaagaatctaacacatgcagctgttatgtaaagtccaaccgtgcaattatctgttttacctgctgttatggcaaatcatgcaatgtctttagatgatgattggcatgtttatgattctgttttacctgctgttttggaagatgtaagctcgactgtgttcccttgtggttttcaagctagtttcttggagctgattgccccagtcattcaccaaaaaaaaaaaaaatgtaaaagtccaaccacatgcagttatcttgttaaattgtttagttgttgatttgctcaaatgttagagcattttgatggttaattcttaattgaatatgcgtggtcaggaaagggatggagggaaatatggagaaaaagtccccttgcatgaatctaataaagctgaatggtaaagaaataaaaatacctggtttgaatatggattatatcaataagcagtcaaatatggttgtgtctgtgtcaccaacacctcaagctgcatctgcattgaagaagtcttcgagtgaaaggaggaattgtctatgctcacccaccacacatgttggatccttcaggtgccggcaccaccgttcaggaatgagccatgccagctctgttggctccaatctctctgcaatgagctctaaccactcactcaaatctcaatactagccttgcctggcttctgtgcttgaatatgttgtgaatattgcaaagtttcaatggaaagaactctcatgttaactaacttacgtgtagtaaaataagttttttaataacaaaaacattattttaattaatttttttgtggtataagtttttacttgatttatctcttttactctaccaaactttattatctttttttatcttaacttttgattcttgaaagagattttgattaatctgaaattcaatcaaaaaataagtatttcaatcaaggattaaattatgatactattcaaataatttaaccttatttttaatatattaatcacttttatttattttttttattggaaagttggatacttagatcatggcatggccttgtctaaaattattggggcctaagaaaaacttcttaaaaagagttcaataatcaattattaattatatcaatttattttatataatatgttaactattaaattttgtggatttttataaataataataataataataataatatgtcatcttttttttttatcattcagcataataaaataggcaacaaaactagcagaatctaaacatacagtaaagcatctgccaagagaagcatttgaacatcagaaagactgctccaaaactgaaacatgttgagacgaagaggcttcacgtttagctaactagtaaagtatttgtctgaacacactgttaagtcataaaatataattgtatatatattcatttgtaactttgtagaatttaataaataaaaacaaaaactaataaatgttgtctatttaaaaaaaataagaaaatggatgcctaaaagatatttaatattaactaagtattttaatttatgatatttttaataaaataatttaaattaattaacttggactgtcatataataaagaatcaaattattattttgataaacataaattatttaatattaaaaatgttaaagaataaaataaaatgtagaatagaaaaaatacaaaaaagaataatataacatacattattatcaatatttttttaccattttttgatgatgcatggagctgaagtcatatttctcaagaaagatatttgaacacgtagctaaaacaacataccatctagactggaaagatatttaaaaaatacaagatctagcataatttattaatgacaaaatggatgtatagcaaaaataagaaaaagaaagaaagaaatgaagttaaataatgatttttttttcttgtgataatatacatctcttgaaatcagtccttaagacagtaatccacttaannnnnnnnnnnnnnnnnnnnnnnnnnnnnnnnnnnnnnnnnnnnnnnnnnnnnnnnnnnnnnnnnnnnnnnnnnnnnnnnnnnnnnnnnnnnnnnnnnnnnnnnnnnnnnnnnnnnnnnnnnnnnnnnnnnnnnnnnnnnnnnnnnnnnnnnnnnnnnnnnnnnnnnnnnnnnnnnnnnnnnnnnnnnnnnnnnnnnnnnnnnnnnnnnnnnnnnnnnnnnnnnnnnnnnnnnnnnnnnnnnnnnnnnnnnnnnnnnnnnnnnnnnnnnnnnnnnnnnnnnnnnnnnnnnnnnnnnnnnnnnnnnnnnnnnnnnnnnnnnnnnnnnnnnnnnnnnnnnnnnnnnnnnnnnnnnnnnnnnnnnnnnnnnnnnnnnnnnnnnnnnnnnnnnnnnaaaagatggatgagaatcaacacatacctacgacttcttgttgttggacaaaatccttttgatttctcaaatgaaaatatcaagaaatccattaaacaaaaatgagggaaattaaaaacaaatgtgaaatacatgtaacaataagaaagatgaaaatgacaaaaggatgagaaaacaaacttaccaacggtaccgatccgatggtgaaggaatgcaagatgcaccaacaaacaattattatatcatcggtggttttgagtttctccaaaaggaaagatgaaaataatattggaatcttgtagttttgcaactggctagtacgatattctgcaagatgcaccaacaaacaattactatatcatcagtggtttaaagtctctctagaaggaaagatgaaaataatattgaaattttgtagttttgcaactgcctaatacgatatcttgcgtacacaggtaatatcactgcctacacgttacaaagagaatatgtgagaaagatgaaagaaatgatataataggtatttaagatttcaaaggaaagattggagtatacttatcaaaaaaggaggtgcatttagcaagtatcaaaatttaatagagggacttataaaaaggagctgcaattagcaagtttcaatttttttttttgagagatttattagttagggttgcgagacttatcagttaggatgcagtttgcaagtttcaatttttttctgagaaacttatcaaaaaaagagatgcaattagcaatttttaaactgatgggtgtcagaccccttccttcttttattatatagatagaagatatacatagaagaagacctcagcgcattttttaccttccgtgagggtatgctagaagttaagcagccaatcttcagtcttgaaagtccctatgtataagattctaggtgcatacggattactacctgttttttgccgaattaacggattattacttttcgaagcaaaataaatatttatgaaataaaattattcccaaaaaacgcaaaaatgttctgaaaatgaattataaagtaatgctatttttcaaaaccgaaaatattcagacattgtttaaatgttaatataaaaaagaaagtggcaatggatataaaggtccttacatatttaacataaaggtgcacttatctgtctatagtttcttttatcttttaaatgagtttgagagagagaacaaatagtaagtttagaaaataattaaaaggtaaagtaattaaaaatgcaaagtttttcaacaacattgttttcaatttaggtttaaattttttttctgtaatttaacacttttaatttttatttctataatttattttcatttgtctttataaaatttgtttacttatttattttaaaacattttagataacactataaataataaaaaaatattttaaacagaaaaaaaaaatgttatctaatatgtttaaggaaaaaaaattgtaaaaaaggattaaaaaatttacaaaaacaaaaacaaaaaaaatatttaaacgttcaaaaaaatcattaacagttaattaggaatgacatatttaaactcataattgtgtcatttgaccaatcctcttatccacacgtcaaagagattaatttcactcagaagtaaaaacattttcattcccgaactgaaacttccgcaatcagcatacacgtttatacgaagaaagcacaaattcattggccagagagcggacacaaatttaccataaagaaactacatacactactaatccagaaaacggcaccaaactagccaacattccaaaatttcgaaaattcaaaaaacataaaacaaattaaaagactgtttctccaatcattgtttctaaaaacaaaacaggcaatcaagtcagatttaatcaacttcttccatcttgctaccctcagcatcggcatcagcatcagcgtcctccagaggaggcatcatgtcagcatctgcttcaccagcctcttcatcaatactcagtccaagcttcagcatcctgtgaatcctgttaccgaaagtgttggggtcatccaggctgaacccagaagttagaagagcagtctcaaagagcaagagcacgagatccttcacagatttgtcattcttatcagtatctgctcgcttcctcagctcctccatgatggggttctcagggttaatctccatcgtcttcttgctcgacatgtatccagccatgctgctgtccctcaatgcctgtgctttcataatcctttccatgttggctgtccacccatattcacctgtcaccagacagcaaggagaatccacaacacgatcagacaccacaactttctccaccttgtcacccaacacatccttgatcacatggcaaagaccctcaaatttatcctttagttcttccttctttttcttctcgtcttcactctcgtcaagtttcagtccttccttggtagcagagaccagcttctttccctcaaattccttaagctgaccaacagcatactcatcaatagcatcaaccatgtagagaacctcgtaccccttcttcttaagcttttcaaggaagggggaattctcaacagctttcttgctttcaccagtaatgtagtagatgtcattctgtccttccttcatcctggtaacatagtccttgaggctggtcatctcatcaccactcttagtggagtgatacctgagcaattcagctagctttgtcttgttctgagaatcctcatgaataccaagtttcaggttcttagagaaggcttcataaaacttgttatagtcctccttgttctcagcaatttcaaagaacatctcaacacacttcttgaccaagttcttcctgatgactttcaggatcttgttttgctgcagcatttctctagaaatgttgagtggaagatcctcagaatccacaatacccttaacaaagctaagatattcaggcatcaactcctcacagttgtccatgatgaagacacggcggacatacaatttgatgttgttaggcttcttcttagtgtcaaagagatcaaaaggtgccctcttgggaataaagaggacagccttaaactccagctgaccctcaacagaaaagtgcttaacagccaaatgctcttcccaatcattggtaagactcttgtagaaagcagcatattcctctttcgtaatctcttcaggtttcctcatccaaataggcttctgcttgttcaccaatgaccactcgtgagatacttccttaatggtcttctttttcttctcctccttctccttatcttcatccacatcttcaactttaccctcctcatccttcttctcttcctcatcctcatcatcagaaatctccttttcagtagtcttctcaatccagagagaaataggatagctaatgaattcagaatgcttctttatcaaatccttaagacggcgttcctcaagatactcaagttgatcttccttaagaaacaaagtcatctttgttcccctaccaaggttctcaccagatgtatctcttgtcacagtaaatgagccaccggcatgtgactcccagacatactgttcatcatcattgtgctttgtggtaacaataaccttatcagctacaagataagccgagtagaaaccaacaccaaactgcccaatcatgctcacatcagcaccagcagccagggcttccatgaattccttggtcccagaccttgcaatagtaccaaggttgttcaccaaatctggaacataaaacgcacaagcattagagaaaacagactaactaacatgcacagtccacgataatctcacaaaggctaacaaaatatttaatcttaccagccttagtcatgccaataccactgtcaatgatagacaatgtgttgttggtcttgtcaggaataatgtgaataaacaactctggctgagcatcaagcttgctcttgtctgtaagactctcaaatcgaatcttgtccaaagcctacattgttgtaaaggtaataacatgtcagcgatcagatataaggcccaaagtgtagaataagagaaaacctaaataaagcataattcacaccaaatccaaacgacccactcactccccaaatagaaggacgtataacaccatcagttttgcctcaatcaagatgcaatggttgcagtgaaaaaaacggcatagtacaacgtaaatctcacttaacagagacaacaggaacagggacaaaaattatgtagccgaaactcaataaatttcaattatgctatttaagatagtaaagagaataatcagcaccgtttaacaatggaaagagcataatatcataacatgaaccctaacaaatttaaaaaaaaaaaaaaaaaaaacacacacacacacacatcaattgttgaactatgaagacaacaacaggtaaacgcacgcaagagaaatcacaaaaaaataaaagggggtaaagacatgtccaacaaaccctgcatgtgtttgagcaataaacatgaaaataaagaacgagcgcagtaaaggacgtaatcaacaaacggaaatagaaaaacctaacaaggatcgataaaaatcttacgtcagaggcattgctgatgagctcacgaagaaagatctccttgttgctgtagaaggtgttgatgattagactgaggagctggttgatctcggcctgaaaagcgaacgtctcagtctccgatgccatttcgtttcaaattcggaaaaagagggaaggtagagagttgcagcgaagatgctagaacagaatgaaaaggaaggagtgcttagagaaatggaagaaagtggcaagttatatagcaagtgttggctagggttttatgtcttctagatccttctacgctccaactaatcatcttgcatcaccgtttcgccgtggacttggtttagttcgttttcagccattagattagatttgattgattacaaattattcatatcatataatagaaataaatatatatatcaaatgatcttgatgaaatttaataaatttgtttacagatgaatattaaatatatctaaatctaataattacagatttagtaaaactaattcatgcaatccttaccaaggatcacaataaaaattaaaaaataatagtttgttgttcttaaagtgacgtatctctacaaataagagaaataagatagtgtgagcaatatatgatataaagatggtttaaattaggtaagatataaataagagttaggatcacgatatatttttggttcctctgagttttttttttatgttttttttttaattttgatttatataattnnnnnnnnnnnnnnnnnnnnnnnnnnnnnnnnnnnnnnnnnnnnnnnnnnnnnnnnnnnnnnnnnnnnnnnnnnnnnnnnnnnnnnnnnnnnnnnnnnnnnnnnnnnnnnnnnnnnnnnnnnnnnnnnnnnnnnnnnnnnnnnnnnnnnnnnnnnnnnnnnnnnnnnnnnnnnnnnnnnnnnnnnnnnnnnnnnnnnnnnnnnnnnnnnnnnnnnnnnnnnnnnnnnnnnnnnnnnnnnnnnnnnnnnnnnnnnnnnnnnnnnnnnnnnnnnnnnnnnnnnnnnnnnnnnnnnnnnnnnnnnnnnnnnnnnnnnnnnnnnnnnnnnnnnnnnnnnnnnnnnnnnnnnnnnnnnnnnnnnnnnnnnnnnnnnnnnnnnnnnnnnnnnnnnnnnnnnnnnnnnnnnnnnnnnnnnnnnnnnnnnnnnnnnnnnnnnnnnnnnnnnnnnnnnnnnnnnnnnnnnnnnnnnnnnnnnnnnnnnnnnnnnnnnnnnnnnnnnnnnnnnnnnnnnnnnnnnnnnnnnnnnnnnnnnnnnnnnnnnnnnnnnnnnnnnnnaacgttggaccttattgtacttttcattttaaattgatttaatttaattttgtgctttatgatcatttaattgattatcagtgaaattaattttataaaattgatttaaattacaattaaaagtaaataaaattttcttatccaataaaaaagttgtctataaaaattaaaactcaatttgtatacataatcaattcttcaatgtgtgaccaaatatgtgaacaattatctaaaataacattagttgatattttaacatgattttagacaattcaacataaaatcaaacacatatttataaagtgttggattttaatgattttaaataaatgttccaatgtttggtatcatgttgaaaaattatttatgagcacataatggattttgagttaaagcatgtttaggtatgtttacattagatgaaaaaaaaattataccaatttttactattacttaaattttaaaataaaaatataatcataaataaatcactttacttaaaaaaaattgcaaaatcaaattgattgtgattaccctaaaggtagtgaaggaaatataaaagtaagaagtatccacactcaaattaacaccttatattataaacacttcattaatatgcatcattttttctatttatttcatcttatcatgtcatatcacctattgtagtttacacttttttctcattctttcccaactaatatggagtgttgataattgtcatgcatagtaaagttacatgtaaattacataataattatcttatcttttttcctttttaatgcttctttttgtgattaaaacttaggaattagtcatttatgagctttttatccaatagatgctaaattttgtttattataagatgttggttatatttttttgtaaaaattcactgcaaggacaaggaaggagaattgagggtctgctcgctcagtgtgcagagacccactgacatctcccgttaggcacgcgaccatgacactaagctgcgttttaaggagaaatatgagggaaaaagaggggattatcttggaacacttggaaagacagaaaacaagcacttaggtcacgaaggagacatccttccacactgttggagctgtcattcatcattatgttcctcatttccctccatccactccatttcccttgccctaaccctccatttgtataagtttctcatgaaaatgagaggctagaaccccattattgggagttcaacaaccaaatgcttttatgtaatgattttaattatctattcaatgtcatttttgtattattgttgtttttctgagttattatcatgttagtgatttgatcatccattttcatgtattgttataggttttaatacattgggaaattgttattttcttagaattgaaaaacacttctaaatgtaccatttctagggatagaatggttttgtttagcctaagttgttcatctttaatcttaatgcaaattggttaactcttaagggattaggagcgaaattaaatgatttagggtcttgcacttgaggaatcatgactagaatatatcagtagatgaaggtgattggaaaataatattgaatagcgaaaaatctttaatattgcatcaaaattagtttcgattagttaagctcccaacatacattacatcgtatttcaaccatcactgcaatacttcgagtgtttgtatctttgttctttgtatttacactgctttatagtttagtaggtcaagtttaattatatgtcatttattctaaagaaccaaattgattaattaattgtttagaaacaaacgtgtattaactctgagtacaaacaaagttcatgtggaatcgacattcaaacttaccgtttaattattactttgacaaattggtacggttgacaaagtgttaacaagtgctccatataacattacaataaattgttaggtgtgtttgtggagatcattaatatttacacttctctttttttgtcttttgactctatgattcaatgatatcttttcatattatcaaagcttaggttaaacttggcatggaataaatgagaaatacatgcaatttactttgaactaaaagtttaccctttttgttatcaaacttaaaaataatgaatatattgtctcttatcatatgtgatgtatatggcatcctcttttccctaatttcgtgtatttgaaaatattaaataaattgttattttattttttactattgatgctttgataattgttatgtatttatatttttgacttaaaataattaaaaagaatcctatcagttagtttagaaaattattataaatttaaataaattaagaatttgtgtgtatggtaaaaaaaatggaattttaagtattaaaatgcgtttaaataattatttaggatttattttattgtatagataattaaatgctagagtgttagatttaattaagtattttggttaatactattagattgggagagtgaaggatgagtcgttgaagcccaaatttcactttgatttgggccgaaaagcacctaagcccaaatatgtcaacaaaaagaaaaacaaaaaaaaaaaaacttttcactctcctcagtcgtaagtcctaacccaactagcgcgaagaggatgcgtgagaattcaaggagtaattatataacagtattacgatacatttgttcagaaactaaagtaataccagtttattcttgaaacctacaataggcttttgaactggcagatctgctggaatgagatctctaatctacccttatagtgtattagtgtggtagattcaattttaggttctttgacaatttttatgatgtcatacaagatgcaagaattttttcttttttacttttagataaatcacattttggattcttgagtcatttttaaggatctcacgatataaactgcacttaaatatattttattaattaattagggatagagacataaaaatatatatatttttaaaatgggaatagtttttgggaaggaatccaatctctaagctgaacatgtacagtaatagatctgatgaagagagatttttaaactaaaaaatcccatgcataaagatgttcttccttccaaacaaatgaattgtcagcggaaacttggaagtgacccatgaacatgaacattgctgatcatctaactcttcctatgatttcactgtttgttgccacctagatcgatctgcgcaacaaattcattcgtgttgcatggatataggaacacaacacaagtccattggtacagcttcgggtacaatggttccacaaaattgacaagacatattaagatacgtgcatgagaagatatatttcatgtaaaaaaaaataagaacatatactgattaagtataaaatcgcaatcacaatatatatacaatttttcataatgttatatgtaactatgtatatacattataaatgctggtaccgtggtacggaatagtgcctagtacaggtacaagtatttaggagtaccatgacaaatagtagtattcatgcatcgtactttctaatcgcaagttaacactttcttcttttctagtcaacattatctaattgatgggttacggaaatctgttgctttcttccggttgttccctaggtccctcccatctccaaaatggaatgtaaaatagctttggcttttttattattattagatttaagtgaaggattcatgtatgtcagagataaaagggaagatctatgaggattgataaataaataaataactaaacggttgagattttggttaaaaacatatatatgacagattatatatttaaggttatgtggaccttaaccaatatgaacaattaatggatgtaattatgtaagtccttaattttttttatcttcttaattaaagtgaaatacttgtttcaaaggggaaattattgtatagtggagatcattacattgtatataatttccactaaaatgtaatatgtaaccgaattttattaattaattatttcataaataaaaaaaatcgattatgtgttatgtaattaaatatatataatcaaaattatggacacacataatggttccaaaaactctatagttatttttagttttatagggattgaaatctataggtccaagaccaaaactttaggcacataatggtcccacttttgtttgataacacattacctataggttaaattattctggttcctggtttataattaattaatactgcttgactttgttttattttttgaatcgcatacgaatctttgaacaagttagcgagacaacgctcttaattatgtttcagtggacgccacaatattgattctacctaactactgttatcttaaaaatgacttgtagttatcttgatggcaaggaggtcgctttgtaatgatgactggaaacagtgaatagaactagtttatcgaccataggccatgattaaagtatataagataattaatgtgaacaagatgatccgatcaagctatatttttaactgtaaagatgcattgcaacccttgaaaatgttcctttttatactaaaataaaatctgaaaacttgttttgcaaattgcaagctaatttaccattggatgataagtgaagtttaattgtgaactctaacgaagagatgatcttaaaatcaatgagtttccacaaaaaaatattttagtacgtaatagataagatatttacgcattaactggacgtataattttatagatatttactcatactttacgtaatatatttattgtacaacataactagaatttgaaaaaaaagaagaagacccaaagctagccagtttatttaattgcaaagtactaacagcaaaattcctgggttaccattcatgactcgtgagtggagttgataggacacgttcaaagtactgaggttcatatatgtaaaggatgatattattatattctaactttccatgcacacattacatataataatttatagcatttggaaagtgatttaggaacagaaaccagaacttacggatatatttagacagctatgaattatgatatgatcaaacagtcacttgatttaatgtgattttccttaggaccactattttttatcaaagacgaagtttttttcaagctaacaatatgtagagtgaaactgactctttggaatgagactgaaatcgaagaccatatttttcttttaaccgagaaatgatttttagtacgaaatctatctattcgcacagataatataaaatgacggatgttaattatttactttcctgtgcattattcgtcattttgtgtatcttttcttatttggtgattagtaacaaattcgttctttcataccaaactattagcacgaaatagcacaactcaagtaaatatgatcaccaaactatataatccattagaaatactatattctgtatattatatcaaaaaaagaaagaaagaaagaaagaaagcaagaaagattatatgtatatatgggcaagcaataaagctatgttcggggatacggcaaagtcttttaataatggaactacttagaggcacagggcatcatcttcatggaggaaaaacaagccaaaactcagtggagcactttgaaaggtttaaaaattagtatagtgaagatctagagaaaaacaattaaaattaatggatctatatatgactttaagcattcactcattgggtggcaatggtctctaagcccccttcacattgaattaatttgctaatgcggtaggtgataaatctcaattatagacaaattgcttaggatgtcgacctatatggtcttatctctatgatttcgggaaacaatcactagttggaggaattggccaaataattagaaagaaacaaagatttcaattgttttctaaacagtaaaggatttgtgatattgatcagggatggagcctcccaaacgtgtgaattcgggaagtgtaacttggcaattcttcttacatgatttttgatgcccatggaccctatatatggcttattaattaattaatattatggtgatgggatttcattattatgtcactaacaaatcatgcttggttcgatcaatccgtgttattattggggatcaaaagtccacttgatgtgcatcgaattcaccacttgctgactctattgcacgtgtgccatgcattaaggacaaaagttcctatgctgctataccagtagacctctcaaagggtccacctcaatgcaaatcataaaatctctcgctatctttctctctctattcttctcatatttccagaatttggggcacggggaagccattctgtttttattgtatgattacacttgcttgtataattgctaaagagctaatgttgactaggtaggcaaaacaacaaaaataaataaataaacaaaaaaagagagatcttaatttaatgtgcagatcactaatcattaatttgataaaaatcggcttagagattacatgtcttttttatgtaataaaacaatcttcaaattaaataagactaatataaataacaaaattctccttcaccatatttaatataattagatacttaatatttaaacttgatatcccttattaaattaaaataattttgtataaattgattcaaattattatctatcaatcttgtaagtgacatcatattaagctttattttaattatatgggtggaattaccatatatgctctataatggccaacttctttcatacacatcaatggcccatcttccagcaccagtagtagaagttgcggctatatcagtgataaaatggctaccgacaatacaataagaacatggacagaaggctcatattgtaatcgaatggagtggtgataatgtgttcataggcaatactaatgcgctgctctaataataatgtttagacactcgtactacatttataatttgtggccactctattgttggtcaaatttgaattttccactgatgttgttcaaatagattattgatcgatattctcctctcgtgagcatgcatgagctcctacctagctaacaacctatcactaaagagaagctacctatcttacaaataattacaactctcttttccttatgcaattaatttgttttcccaaagtaacaaaagctagctgaggcctgacactcacttttaataaacaaatattggagaaccagggagcttgggggggtattataatcttaatggaaaggaatatcataatatgttgataagcaatgcttcaatctaaacataaggtacaccacattatgacagcctcagcagcagcatgtatagggttagatttttaattatttccatatatagaaaatccagcaatgttttgtttcatgtcatatgcctggctattttctttgttaggattagcttatgacttgttcctcatgtttttttttttaatcaaatgttggtggatccatgtagtacgagatatacaacagcaggaatgtgatttagattaaaaaaatacgattattcatatatacaaataataattttcgttcatgtttgtcgaaaaccgtcgtggtatgagtcacatagataatggaattcaaatactcagaaggatgaagggaaggtgtgtgcgtgtgtggatggggggcagtaaaaaacgaaaagaaaattagtattaatttatttttaaaaaagtaattcttgaattaacaagcaagcatgaaagaaaaattaaaaaatgggttataagatatgttaattagttaagacagaatcacatagaggaatcaacaattatataacttggtgtaaatgggagtgctagctagaagtgttgcgtaattacatttttcaagaggagctaattatttatctatggttatttatgattttttttgttagagatgaagaaatttatggtggaagtggaaatcatcaccacatttttttttcttattgtctaatctttcttttccatttactgaattcatcttgcatgggattaccaagtgatccaaaagggccttcttgtttttcatagctattgggtgaaaaatgacatcatgccatatgtgtaatgtaaacttgattgttcataagatgcccccaggggaagccttttatgacttgctctctttttcttttggggttggatatatacctttatgactacttttttacaaagagatttaaagccgacaattaataaaatggtggggttagagaatggatcgtttcatactaatgcaagaattaatttccatccatgtatacatggtgccttttgtctcttctttttaatgtcattggggtccctttattcaccctcttttgcctcgttgatctccccctttaccatgaaatattactttttcttttcttttcttttctataaatcttctgtcatcatacatcataataaattaatatgcttactttgaaattccattattttatgcacaaccatctctaaattagtaaaagtttaagtttagggtcaaatttatgtggactataagcctatatctaagcagctatttggttctaaaccgttaaattaaagctattgaattcaatgaatccaaagctgtcaattacacattacacgaatgcatatcataaataaaacttgtcctaagtctacagtttcgatttgatgattcatgatgtattagtgggtgtagctgaaacttccccatcgatctattatcagcaaaatgaaggagatggtagatgggacaattggcaaagattaattttgatagtatcatgcaattgctagattcataatgcacagaacagagtcataaaagttcaaattagataaggcataaggatcttcagtcatcttcaagattcatttatatgataggtggggaaagcggtaccctaaagttgtgtgtgtctggaaaagattgatatagctgtaaatgtgtctagagagtagaaacagcatatatatatatatatatatatatatatatatatatatatatatatatatatatatatctttagccatgtgaattccgtattctattcctgctttccatatgcattggttgttctgatatttttatcccttatctcgcttccacccccatatggtatcagagcctgacggggaagtaggaatatatggctagatctgggaaaaatcttacttatttggtatattgtccagatatgctataaattgggttgttttctctttctgtaaatgaatttaaaatttttaatgtcttaactggaaagcatgacaaacagagaaagctctgatctggagttactggggtagtaagtcccgttgagttgagggcagtaaatcctacaagtttttggaaccccagatctgaccttttgtctgaaaattcatcggcttggttaagattttaaaataaaaaaaaaaaaaaagtctggaaatatctcagtaagtaaaattttatccggatctatctttatacccttacagaaccaaaggatggcgatgatatcaggggactaattttatgctcgttccctccatgtctctctttcgctctttttcctcccgtttttcttttaagtcttcacaaccctcctcatcttcttttaatcaatctcaggctgaaaatgctttaatcaaatcaaacagaaatattttcaaagaagaagtttcttttgaggatattaatcaggatctggatgactggaagatacccaggattccagataatgaactttataaacctggaggcagatattttcgaaaatctgattttataattagaactgtcgaaactaatatccgtcttaaaactgattttgatgaaatcaaactgctttctaacaattctttaaaacagcatcggcaaaattataattttttgcatattggatgtgtccaagttgctgctaaacctctcgggattgaaggattaaacacctctattctcttatgtcttagagactcccgtcataatcaattcaccgattccatcttaggcacagttgaaaccagccttagcaatggaccaatctatttcaattgttaccctgataggactgtcagccttgaggatgcaaacatcctagatgtcttgaccttagatgtccagcttcatggtcttgatatgaagattggctctattccggtcaacataatctatagggttcaatacaaggtaatgaactcttgtgtctctcgtgtcctcaaaccaaggaaaactggggaaactactttgtttctcacagacacaaccaaggccaaggttgtaattcctaaagttatcaagtgggaagacattaactttccgcaaacttgggccatggatcgggttgctccggcaaaaccccaaactactcctagcttcgagtctgtcagacagtatgactctggaagggttgagatcaccttcaataggtccaactctttcaacaccgctagatcatccttcactagagattctaggtctgaaatgttcggatctgtcttatctagaaaatccttttctgctgctcctagtggaagtggtagcagaatcaagcttcagggggtagaaacctcgtcctccattcctcaacctgtctaccaacaggaaactcctgaggaagagtctgccaggtctatcccatctccaactttttcatctatgcaagattatgaagttattcatgattagtacgacctgcatagattatcaagccctaaagctagatttcgactctgaggaaatgactcctcaaagagagtggttccttagccattatcagggcaccagtaaagaccaaatccgggaagagtattattcttttcttaatcttgtcaagtctcagatctttttctttgactggtttaaatcttatgcagcttatcataagattgattatcctttcttagaaccaaacaccatcagtgtcatcactaggtatgatcttaaggatggccagatagtccgatctgagtttccaccatcgaccaagtttattcttcctaatgttaggaacgaaaagcatggtcacatctatgcctcaccttttaagtctagggatgagtctgatcccataactccaaaagatatcaagaatcttatggagcaatccaactataccaacaaatatctccaatccatcggggacaagttgagtgagaaatccagtcttggtcctgaagccagtccttcctcctccaagactatccaaacccctatcttcaaacccttcaggatgactgataagctccgtaaagagtttgccaaacttagagcttatgatcagccctctgaagaatccaaggataagactgaaggattaacatccattattatccaggatactcctcaatcatcccaggaagtccattccaaacctacccttactcgggccagatctagacatgaagcccaaaaggacaaagataaggagatcaatgtccttgaccaagctgagtctgaaaatggaaactctgactcagaaagatctgtccaaatcaaccctataaggaaccagccaaattggaaacaaccatccaagttgtactaccatagggccaccgctcctgatcttcttttagaagaaagggagagttccaaatcctttaatgccaaccatgtctatgaatggaacatagatggcaaaacagagtaccaaatcctaaacatcctccagcagatgaccatggttgccacagcctatgatacatcccttaactgcacagaagcagccatcgtaaccattttagtttctggttttactggacaactaaaaggatggtgggataactatctgtccgaggaccataagattaccatccaaaatgctgtcaaaacagacaatgatggcactatcctaacccatgatagtaaaccaatccctgactctgtcaaccagttaatctttactatcgttcaacatttcataggagattccagtctttggaaagatagatctgctgaactcctttctaatcttaggtgtaagaccctagctgattttaggtggtataaagataccttcctcactagagtctttacccgtgaagacagccaagaacctttctggaaagaaaagtttcttgctggactgccgaaatccttgggagataaagttagggacaaaattcgtagtcagcaccctaacaatgaaatcccttataagcaattaagttatggtcagcttattgcttatgtccagaaagtcgccttaaagatttgtcaagatgataagattcaacatcagcttgccaaagaaaaggcgcagaaccgcagagatttgggtaatttctgtgagcagtttggcctcccttgttcatccaaacctaggaagaccaagaagcatacccataaacctgataagcagaaacctagaaagtctgtttatcatcgtcataagtctggaaccccacctagaaagcttaggagagaattccagactaaacctcctttcgataatgttaggattcctaagaaacccatagtctgttggacttgtggaaagcctggccataagagtcagtactgcaggcttaagaaaaggcttaggaaccttaatcttgaacccactgtcgaagaacagattaatcagctcttagttgaatcctcctctgaagaggaatcagataaagataattctgaagatcattcttcggaagatctaaaccagattcaagaggatgagttatcttcgactgatgaagactgtccttcatcctcccaggtaaacgtccttaccagggaacaagatcttctgtttgaagtgattaattccatatctgatcccgaagagaagaaaaatcttttgcttaaacttaagaaatcttttgatgaatcctcttcatcacaatcttctaatcataataatttattagttaataataaatttaatcttaaaaatactcttaagaaattcgataagagtactgtcaaaccggtgactattcaggaccttcagcatgaagttaacaaactaaaagctgaaatccgccttattaaagaacaacaaagtgttcatcagaatattttgagtgttctgcaatatggtgagacaactgaagaagaagaacctaatcagaataagcagcattctgatattggctctcctaatgatccagtcagtcccgaaatacctccaaagatttttgaattaattaaccagttgacaattcaaaaattttatatcaagatcaatattattgttggaaccttcatccttgaaactgaagctctgtttgatacaggggcagattcgaactgcattcaggaaggattgattccaaccaagtattttgagaaaacttccgaaaggcttagtaccgctagtggatctaagcttcgggttaatttcaaactttctgacgcctatattgaaaaggatgattttaaaattaaaacttcctttcttttggttaagaatcttaaaaactcggttatactgggaacaccctttatcaaatctatcttcccaataaccatttcagataagggtatttctacgacctatttgaacaaatctattacttttaagtttcttaaagatccgattattagagacttgaatccaatcttttttaaacagaatcaaatcaattatcttagggaagaaatttcttataagaaaattgatgatttgcttaatcagcctgttattcaacagagaattcaatctttgtccacccatatccagagttctatctgtgctgatctgccaaatgctttctggcaaaggaaacagcacattgttgatcttccttatgaaaaggattttaatgatcgacaaatcccaaccaaagctcgtcccattcagatgagtcaagagctccttgttcattgccagaaggaaatccaagaccttctgcaaaaggggctaatccgtaagagcaagagcccttggtcctgctctgctttctatgtcaacaaaccggctgagattgagagaggttctccccgtttggttatcaattataaacctctcaatcaggccctccagtggatccgttatcccatccctaataagaaggatctacttaatcgcttgttttctgctaaaatcttttcaaaatttgacatgaaatcaggattttggcaaattcaaatcagtgaaaaggactgttacaaaactgcttttacagttccttttggacaatatgaatggaaggtcatgccgtttggattaaaaaatgctccttctgagtttcagaagattatgaatgacatttttaatccttactcttcatttatcattgtttatattgatgatgtccttgtcttttctcaatctattgatcaacattttaaacacatcaacatttttgttcagataatcaagaagaatggtcttgctttatctaaaacaaagataaatctttttcaaactaaaatccgttttcttggtcataatatctaccaaggaactatcactcccattaatcgtgctattgagttttcaaccaagttcccagaccaaatcgttgagaaaaatcaactccaaagatttctgggttgtctaaattatgttgctgacttcttccctcagttaagtaatcttgccaaacctctctatgatcgtctgaaaaagacaccccctccgtggactaatgttcacactgatctggtcaaacaaatcaagtcccaggtcaaaaatctcccgtgtctctatctccccaatccttctgccaagaaaattgttgagactgatgcctctgatattggttatggtggcattcttaaacaatctattaatggcaaagaacaaataattgcatttacttcaaaacattggaatcctgctcagcagaattattccacagtcaaaaaagaagttttagcaattgttttgtgcatatcaaaatttcaatctgatttgcttaatcaaaggtttttagtccgtgtagattgcaaatctgctaaagaaattttgcaaaaggatgttaaaaatcttgcatcaaaacagatttttgccagatggcaagccattttaagtatctttgattttgaaattgagtttctcaaaggtaccctaaactctctacctgactatctcactcgtgaatacttgcaggggagaaaccactagttgcccaatgccagactctgtgaaatcatcttcctcacggggaagaggcagatgccgcaccaccaaaccaaggctagccattgctggtctaaccaccaactcaggatcttcctcctccaaggaagaagttcccaagcatcaaacaactgggtcatctacccaatctgggtcattaacccggacattacccccatcaatcactgggtcatccacccagaaatcagactcccaatccgtttctggaccatcaactcagaaacctaaaccacaatcacaaacaaaggcagactatgccatgccaatccaagtccttttggccctccaagaacagggtctcacccatcttccaaaaggccttccaaccaaatcttgggcagacatcacttctgaagaagaagaagatgaaagatgcctagctaccatgattaaaaccatggcaaacaccccccaaataattcaaacaaaaggcaaagccatagttcagcagcctgaacccttggcagtccgtaaaccaaaatctcaaacccaatacgtccctaaaccgaaataccaggacgttattcaaatggaacccgaattttgggatccaagaccaaacaaagtcccccagaaaatctttccgaaggatcttcagggtaatcaatatcatttcaaaccagtctcgatgctcaagacgagacatttttatgagtttattcttgtggacaccaactctgtccagattaaacatcataaaaacaatgactctgagcaaattgcttattcgactctgcaaatccttaaggttcttacaccaaaagaatttggagatttgaataagattaaacgtttttctcaaaattatgatcccattgggttttcttattgggattatcaaacagcctggtataacgtctttaatttccaaaataaagactttatgcattcctggcttatttattttaaacaaaaaactttttataaattcccccagtggtttattcaatggtgggatttttatggcccaatcttggacatacttccttccgaggtagtagctggtctgacaaactttaccaagaagttcgaacatccggatgatgatccattcccggttgatttgcactttttcagcaagctttctctcgcctggattttccagtggagatatgtttatggcaaaatatcaatcaaaggacaattgcctatgctccgcagacaagctcttgtcaaatggtggtctcagtttgaccattcaagagcaagtcccaatcaggtctctctttggttcaatgatcatccgaccctgaccaaggcggcagaccccgaagcatgcacattcctcaatcaaaggtcacaagtcattgcagcccttgcctcttccaccaacaaggaaaagttcaaggaaaacatgcagatgatctttaaactcttggaacaagaagaagaagcctgctcttcctccaagaagccaaagggctcaacgaacacttacgtatgctctccatactcgtgttcaccgccatctacagaagaccctttctttcagaatgaggacgactgttttggcattaatctagaggatgactgtgaaatcaacacccagtcaggagtctccaatcccggcaaatagtccacaagatactgtttgctgacgtcatcatttcctgcggcagactactgtgcagaactgtacactgtggcggtaggttatccgggatttgtaaccggaactgtagaaacaggaaattttgtatctatttaagggctgcgtccctcaatctaacaacaagtttttgaataccttgctttccttctttctcagagaactccctcccccttaggtatacctctgagcaatctttctattttccgttgtaatttttaatcgttttgagaaataaacaagtgttttctcatatcgcatgcattgtttctgtaattgaatccttctcctctcatctgctccctctcatccagttggctctgccgcgcttgagagtttaactttaaatttatgttataaggttaaattattttgttctgaatctttagccatgtgaattccgtattctattcctgctttccatatgcattggttgttctgatatttttatcccttatctcgcttccacccccatatgatatatatatatatatatatatattattcatttacttttctttttaataattataaataaacttattaaattgtttcatagtgcttaggtcattcagatgtagcctattgtttttaaaaatgattgggtctaaagaacgtaaataaaagtgtatttatctttaaattttagtgaattatgataattatatattttaaattaaataaaaaatatttttttatagatttatagacaaacttattttaggataacatgatatttcaaattgagagtaagggatccaaaataattttatgttctctcaagatatttgaaatgttcaaatttgaatatgcatgtgcctaaccataaggatttgaatttaatttaaatatattggtagtatatttttatattataatttaattataaattgttatgtatgtaaaaattttataataattattttaaaatttatatttgttgaattgtataatttaaatttcaaattattgttaggatttgttatgttgttaatgttattatatttcaatatttgaataggaattaagattagatcagtttgttattatccagtattattagcattttgttgaatctctctcttatatatgaacctcatgttgagaaaaaatatgtgagaaaaacagatgaataaatgaaacgaattaggagttattatttcaatttatttatatctgatttttaacatggtatcagagccatggtatcctccatgaaaaaatcatggtttcctctatgaatgggaatcatatcctccatgaaaaaaataatattttcgctgccttattttttcaaagtctttcttcttcacattcccaaacgtatatctccttctatctttttatcttatcttcaacgtatttcacttatactcaatcatctatctcctccttaacgtttaccttctccgattcctttacaaattatgattattattatcataaatttcatttttgcctcgcataacctttgcgattttggttccgttttgaatccttctcgtatctatttgaaggtcattaatgtgaaactcgttgcattattctgagtttttcatagaccaatcccgaagtctattgacatgaacatgtaattgttccgaatccattctcgtatctcaattctccctgcacgtattctatttgaaggtcattgatgtgaagtcagttgcattgttctgaatcttcatagaccatcctgaagtttattgatatgaacatgttattgtttagaatctcttctcaaatttcaattttctttctacctcacataaccaaatcacgtagactatcttggactatcttgaagcacctcttgaacctattgctgatcaaagtcatttctggaagagtgtttgaagaagcaattagcaagttgggcatgaccgatattcatacaccaacttgaggaggagtttgaattgtataatttaaatttcaaattattattaggatttgttacgttgttacaatttgttattatatttcaatatttgaataggaattaagattagatcagtttgttattatccagtattattagcattttgttgaatctctctcttatataagaacttcatgttgagaaaaaaatatgtgagaaagaacatatgaataaatgaaacgaattaggagttattatttcaatttatgaaaattgaactcttgtcaattaaaaataattttaactatgtttatttaaataatcattataaaatttaataaggtatatgattattcatgattaaatgccagaataaatatctttacaaagttgatatatatatatatatatatatatatatatatactttaattaaattctttcttttaagttttgttctctaagtatggtgaataagatatatactggatnnnnnnnnnnnnnnnnnnnnnnnnnnnnnnnnnnnnnnnnnnnnnnnnnnnnnnnnnnnnnnnnnnnnnnnnnnnnnnnnnnnnnnnnnnnnnnnnnnnnnnnnnnnnnnnnnnnnnnnnnnnnnnnnnnnnnnnnnnnnnnnnnnnnnnnnnnnnnnnnnnnnnnnnnnnnnnnnnnnnnnnnnnnnnnnnnnnnnnnnnnnnnnnnnnnnnnnnnnnnnnnnnnnnnnnnnnnnnnnnnnnnnnnnnnnnnnnnnnnnnnnnnnnnnnnnnnnnnnnnnnnnnnnnnnnnnnnnnnnnnnnnnnnnnnnnnnnnnnnnnnnnnnnnnnnnnnnnnnnnnnnnnnnnnnnnnnnnnnnnnnnnnnnnnnnnnnnnnnnnnnnnnnnnnnnnnnnnnnnnnnnnnnnnnnnnnnnnnnnnnnnnnnnnnnnnnnnnnnnnnnnnnnnnnnnnnnnnnnnnnnnnnnnnnnnnnnnnnnnnnnnnnnnnnnnnnnnnnnnnnnnnnnnnnnnnnnnnnnnnnnnnnnnnnnnnnnnnnnnnnnnnnnnnnnnnnnnnnnnnnnnnnnnnnnnnnnnnnnnnnnnnnnnnnnnnnnnnnnnnnnnnnnnnnnnnnnnnnnnnnnnnnnnnnnnnnnnnnnnnnnnntgtcgcattaaacgtacaagccttaattactttcatttctataaggtaatcataatcctgtttattttgccatgtcccatcaatctaaacttttttttttctcctttcattgaatcacatcaatctaaactacctctatagctaaacttgtcacggtactgtacaaattaactaactatctgtttattggtattgaatgtatagctctcttttttatattaaaaattaaaactatgttacaaattgttggtagttatctacactacacatgcacatgcttcaccccaaaagcacaaaatggtgttgaaaataccttttacttccaggaggcatcttcaagtacatggcaactatggaacaggtagcttctgtacctgcaattctgtcaacacataaaaacaagaacgattttctttttaatctcagtattttctagttttaaaccctgacacatgatgaccactttggtgcaaattaagaaggtagatttatgtatttaaatggacattatttttgctagttatctagctttgatttgcggataattctaattcaatagttcaatctactgtaaatttgtaccttccacacttggtcagcatacctttcatggttttctttttatttctttaaagcaaagaccaccaaatacttatgaccagatcctgcacatattataatatcgttcttcatgtattcccttgcttccatgtgcacttcacttctccatcagattcctcacgcactccttcatttaagtatatataaacaaaccgaaatgtgtcttattattatttgtgaactaaattatgtccattttgctcctataaaattaatcaccacgaatatctcagtaatttgagtaaacttgacaccaatcatggatacccaatttagattttgacaatggaaacaaatcctttcgttgcactcttgataatttgatccaaatatgcaagttagttgcttaaagttcagaaattcaaagggtagcatgcagcaaccaccacatcagtggctcatcaaaaactacagccacacaaaagcgatggaccacaaaatgggcctagctaattaaaggaagaaattatctctttgattaaccgaacagagagctattacactcaaccatcaaactgtctattctgtttgattaatcatccatcactatctagagcaaggtaagataattacattaataaccaatttcaaaaaagtgctaaagtcattttccgttgcttgctgctaattaatctcaacagctgattaaatacatgaagatgaaaagtaattattattaccaaattaaagcaggaaacaatataaaatatgtgtccacgtggggaacaaaaatgcaaaatcttctttagatgattttcaccctccaccagtttcatgtcacacagttcactattaatgaaacactatctaacaggaactaataaattgaattacatttagatcgcaaatttctcaaaatttcaactcactacttgacacgttaaccacaacaaaccaataaaaaagaggagtttaccaagatagtgtagtatgattgacggataactatgctccttaagtatatggtcataagttggatccccatagtttgtgtaagaaataacatatattggaaaaggtcagactcttagatagatttcaatatattgagagattagtctttgactctcgtctagagataccctaggttcatcttcaaataaataaataaaaagagaagtttaacttaacaaaaaccaacaaacatcatcatgggtatggagatgtccttgtcattgaacagaagcttattacaacaataaaagaacaaggaagctagctcttctgaccagagcttcttctcttcctctataaaaaaaattcatagaatttccccctctacaatcccaaaacagataaccacttctcttctttcacagcaatgtctgtcatcttaagaaatctgtcacttcctcccaaaatcttctccctcaccttgcttctcttattaaactctcttttgtttccatgctgttattcccttaatgagcaaggccaagctctattagcatggaagaacagtttaaacagtacttcagatgcactagcatcttggaatccttccaacccaagcccatgcaattggtttggggtgtactgcaacttactaggagaggtggttgagataaacctgaagtcagtgaacttgcaaggttcactaccttcaaattttcaacctctcaggtccttgaagactcttgtcctctcaacaaccaacatcacaggcatgcttccaaaggaaattggagactataaggagctcattgtcattgatctcagtggcaattctctcctaggtgaaatcccagaggaaatttgcaggctgagcaaactgcagactttagctctgcatgccaactttcttgaaggcaacatcccatccaacataggaaatttatcaagtcttgtgaacttgacactctatgacaacaaactgagtggtgaaattccaaagagtattggctccttaactgagctccaagtgttgagagtaggagggaacacaaaccttaagggtgaggtgccatgggaaattggaaactgcaccaacttgttggtgttaggccttgcagaaaccagcatttctgggagtcttccttcttcaatagggatgctgaaaaaaattcagaccatagccatttacacaactctgctgtcaggccctatcccagaagagatagggaagtgcagtgagttgcagaacctgtacttgtatcagaactcaatctctggttcaatcccaagtcaaattggagagctcagcaagcttcagaatcttctcttgtggcaaaacaatatagtaggtacaatcccagaagagcttggaagctgcacacagcttgaagtcatagatttgtcagaaaatcttctcacaggtagcataccaaccagttttggtaagctatcaaatctgcaagggcttcaactgagtgttaataagctttcaggcattatacctcctgaaatcacaaattgcacttccctgaatcaactggaagttgacaacaatgctatttctggggaggttcctcctcttattggcaacttgagaagcttgactctcttctttgcatggcagaacaagctcacaggaaaaatcccagatagtctttcacagtgccaagatcttcaggcacttgatctctcgtacaacaatttaactggcccaatacccaaacaactttttgggctgaggaacctcactaaactgctgcttctttccaatgatttgtcaggctttataccacctgagataggtaactgcacaagcctctacaggctgaggctaaatcacaatagattggcaggtaccattccatctgagatcaccaacttgaagaaattgaactttttggatgtgagcagcaatcatcttgtaggggagattccttcaacattatccagatgtcaaaaccttgagtttctggacctccattcaaatagtcttattggctcaattccagacaatctgcccaaaaacctgcagttaactgacctctcagacaacatgctaacaggtgaactgagccattccattggttcattaactgaattaaccaaactcaacttgggaaagaatcaactcagtggaagcatcccagcagagatcctatcttgctccaagttacaacttctggacttgggaagcaatagtttctctggagaaattcccaaggaagttgctcaaattccttcactagaaatctttctcaaccttagttgtaaccagttttctggtgaaatcccaactcagttctcaagtcttagaaaacttggagtgcttgacctctcccacaacaagctctcagggaacttggatgctctctttgaccttcacaaccttgtttcactgaatatttccttcaatgacttctctggagaattgcctaacacaccattcttccggaaactccctctcaacgatctcacaggaaatgatggtctctacattgttggtggtattgcaactccagctgacagaaaggaggccaagggtcatgccagattgactatggagattataatgtccactctcttatgcaccagtgcagtactagtatttctcacgattcatgtcttgatccgtgctcatgttgctcacaaagcactcaatggaaacaacaattggttgataactttgtatcagaagtttgagttctctattgatgacattgtccggaacttgacatcatccaatgtgactggcaccggaagcgctggagttgtctacaaggtcacagttccaaatggccaaatactagcagttaaaaagatgtggtcatcagcagagtcaggagcatttacttctgaaattcaagcactaggttcaattaggcacaagaacatcatcaagcttctgggttgggggtccagcaagaacatgaagcttctgttttatgagtacctccctaatggaagcctgagctcattaattcatggttcaggaaagggaaaaccagaatgggagaccagatatgatgttatgttgggagtggctcatgcacttgcatatttgcaccatgattgtgtgccttccatattgcatggagatgtcaaagccatgaatgttttgttaggtcctggctatcagccttaccttgctgactttggcctagcaagaattgcaagtgaaaatggtgattatactaattccaagccagttcaaagaccctacctggctggctcctatggatacatggctccaggtacttttttcacactatgtttgaattagttatttttcggtacttgcataaccccttcaaatagtactaattttttgttgttttggtatatgtacagaatatgcatctatgcaacggatcactgagaagagtgatgtgtacagttttggtgtggtcctacttgaggtcctgacaggaagacaccccctagacccaacacttcctgggggttcgcacttggttcagtgggttaggaaccacttagctagcaaaggagacccttatgacattattgacccaaagctgagagggagaactgattctactgtgcatgaaatgctacaaactctagccgtatcatttctatgtgtcagcaaccgagccgaggaccgtccaacaatgaaggacactgttgcaatgctcaaggaaattcgacctgttgaggcctcaaccacaggtcctgatgtattaaagggagttttaacagtgcatacttctccagcacctcctatgaaaggtgtttcacatggaacttctaattgttcctttaatttctcagaggactcaatctgttgagcaagcatgcaactcatagaacgtatgattcataacatgtgcatacaaatggaatgtcagttagagctggccagaagaattactagacatgttcaaatttaatccaagatatgtaatgcatatttcaagaatccatgtattcaatttaaataataaaaaaaacattctagaatctagagactagagcctttcacacccaacaaattaattaagtttcaggctagttggttcctcaatccgatgtaaaagtcaccttggcattattgatatctttgtaacctttgtgcttttacctgaattcaaattttgatgttcttattttagtctttgtggtgaattacctaacatggaaaacaattgataataatttcctggtctacaagtgctgaaacttctcagatgttactgccaactggggcatttctaataaacacagtacacttaaaagtccattttgaataaacttctacataagtacttaaaagaggaaaaaaaattgaacttctctcatctaacttttctaaaaactggagctcataagttgattttaacttattggacaagtttaattcatttcaccttcttatttttttcttttataaggtaagtttatccaaataatctgtcaacaagtgatattaattacaatgattggaaatttttggatattacacacagaaaataagattcctaggctgcatctctctctctctctctctttctctttcacttattcacacacacgcacgcatactcaagtcagcctttcaattccacatggtcccacgttcaatacctcacatgtcccatgtgctgtctgaaagagactttgcatttgcaacaattggaaactccttcagaagcacatattaagtttggaatgaatgaaagtctgtgtatcttaatcacacgcacatgtatatgcaggaccattattattctggaaatgtgataggtaacatgtaaaacagatagaccagttagtccagcagcatatgcagattgcaaatacgaacaagggaattttttttatcatttgcaaggttcacaaaattctctgaactgaccaaaaagcttattcagctatatcttataagattctttcgtgaacaacttttaggcatttcttggaagagtacgaagaggactggaaataattgaggaacagagtttgtgcattgcattatatgtgaaaagaatgagtacgagaataacgatttaagtacattaaaatatccacaaaaaataaagtaaattaaaatgaagttgcaagaggatttcaattattttatactaatgaatgtcttcaacaataggaggatcacaaaagaaaattagagcatggatttgtcataaagtaacatttcgtctcatcagaatatgattttcctgcttttccttttgactgtaaacactgaaaattgtattatgaacaaatttaaatccttttataataatattttcatttattagataattttttttatattttcaaagtattaaatgcatttactttttcatttaaaactattttttataagttttagaaattttgataaaaatattgtaaaaggatataacattttttttaatccatccatttattttgtactaattcgtaatcatccgtgtattgtactaatttgactnnnnnnnnnnnnnnnnnnnnnnnnnnnnnnnnnnnnnnnnnnnnnnnnnnnnnnnnnnnnnnnnnnnnnnnnnnnnnnnnnnnnnnnnnnnnnnnnnnnnnnnnnnnnnnnnnnnnnnnnnnnnnnnnnnnnnnnnnnnnnnnnnnnnnnnnnnnnnnnnnnnnnnnnnnnnnnnnnnnnnnnnnnnnnnnnnnnnnnnnnnnnnnnnnnnnnnnnnnnnnnnnnnnnnnnnnnnnnnnnnnnnnnnnnnnnnnnnnnnnnnnnnnnnnnnnnnnnnnnnnnnnnnnnnnnnnnnnnnnnnnnnnnnnnnnnnnnnnnnnnnnnnnnnnnnnnnnnnnnnnnnnnnnnnnnnnnnnnnnnnnnnnnnnnnnnnnnnnnnnnnnnnnnnnnnnnnnnnnnnnnnnnnnnnnnnnnnnnnnnnnnnnnnnnnnnnnnnnnnnnnnnnnnnnnnnnnnnnnnnnnnnnnnnnnnnnnnnnnnnnnnnnnnnnnnnnnnnnnnnnnnnnnnnnnnnnnnnnnnnnnnnnnnnnnnnnnnnnnnnnnnnnnnnnnnnnnnnnnnnnnnnnnnnnnnnnnnnnnnnnnnnnnnnnnnnnnnnnnnnnnnnnnnnnnnnnnnnnnnnnnnnnnnnnnnnnnnnnnnnnnnagttgaaaattttctacgaaaatattaattaatatctctttttaatactgtttttcttattataagagtctcaataaataacttgaatttactattaattagtaaagtccacattaaatttaacctaataataaataatgtattaaaaatatttttttataagcaaaacttaaagtcgatagttttctatgcaattcctcataaatatgttccagattttaaaaaagaataatcgcagttttcacaaattttatttaaggaaaaactcagtgcacacttgagagacctatttttagagggaataattgcttatttttaataagcactctttcaaaaaagctaaaccaaacaaacaatgtgaaaataaaatgatatatttcaaacgaaaaaattacataaaattctgtggtgctattgaagagttctggtaactgcacgtctgcatccaactagccctttaagtctcctacgctttatgaaataatcaaataattcaacacatgccattatatcatatcattaatggcactcattctgctctaaaattctgaatgctagttgatgaatgactgttattggataggcatgttgataatttttctagcgaaagcacacatttaagataagcacacgcatcaattgtttctagatcatatcatatcacacgatatctacaagaattgacacagtggactcacaacaagtagcacctccttagtggtgcttgctgcttttgtctcagcctcaacaagaaaaaaaggtagcatcaatgtacccagacaagtgtagtcttgtgtgttcaaatgccacatggccttgagcaaattgaagcaatgaactattagttttcttgcaacagcattaagagccaaaggaggcatcaaccctaccatattacacactatacattttcaagaaacatgtatggagcccaccaatgaatttccagattgatatgaatgttggatgtcccaattgtgcactatggagaattctggtcctgcctgtctaatttctttagtatgaagttaatgacattccagtcaaagccacggtactgaagccaccgaacaattcgtggtttccttgtctccttgagtacattctgacctctgaaccactgctttgaggcctgagtataaagatgatccatggaatattttgacaagccaataactgacttgtgatcttcggcacaatcattatccttaaagaccacttcaactgccttctcagcatcagcttgactaactcccttcttgaacagtgcctgccacaaaaattgcaatccatcacacaaaagtatctcccttggatgaaataggaagtatatatggctattgggcactgaaggcatgtggggtgaaaggtctgtgccttggccttgcatggcccacaacaacagtaaagaacctttaagcaaacactgcttttgtgcatccctagtgtgtttggggcatctaaacttgaggaaaatgatgagaagagaagattgaagccttcattcaatcgattttaccttttctggaggaggggaagggattaggttcaattcaatctaggcaatttttgcatatttgggaaaaaaataatcagatagttttaaaatgaaacaaatagagccctcaacaagtagccaagtaatagaagacattattcgatcagataaattacaagagaaaagaattgggtcggagctttgcatttgttgaacaattcgctatgaaaaataaaccaaattatgacacaagtcaagcaggcaaaagacataattaaacttcaaaagcttttagatgtagggaaaaatcaaaatatagattacatgcacaagctaaattttcagatacagatacttagtaaatgatatattattattttaacattgtcctcgtatgcaagtatatattttcagattttcacatttgtgttcccaaaacagtaattgtgaaaagggaaaaaaagtgaatgcacactgctatgctgaattagcaagatgctgtcacaatgcacgtcatcttttcctcctaattctatattctagagttaaaatgatgatgaattttagcaagcacaatataagcataatgctaacacaattatttcctcttctgcactgcaatgggattaataacaaaacacggggaagaagtattgatcaagaagataaaaaagcagaatggaacagccaacatgtaagaaagcaaaaagtaataggacaaacaaaaaatgcaaagaagattaacttgtttgatccgccttggcccccaacttgatgaagtccatctagattgagaaaatgtttcagcgtacaacctatcattgatgaaccctctgatacaaaaaaggttaaaccaatcaccataagtaaacataaagtataaaaatgtctgcaaactcagtttataaatgaacttaaaaaagcatattttgaaaaatactgcacaatatcaaattaacatgatataaatgggtatatgcaaccttttaaaaaaaattgagatgcatgtaccacacagtttattctgaatagaacagaattactttatctgcatatataaaataatagnnnnnnnnnnnnnnnnnnnnnnnnnnnnnnnnnnnnnnnnnnnnnnnnnnnnnnnnnnnnnnnnnnnnnnnnnnnnnnnnnnnnnnnnnnnnnnnnnnnnnnnnnnnnnnnnnnnnnnnnnnnnnnnnnnnnnnnnnnnnnnnnnnnnnnnnnnnnnnnnnnnnnnnnnnnnnnnnnnnnnnnnnnnnnnnnnnnnnnnnnnnnnnnnnnnnnnnnnnnnnnnnnnnnnnnnnnnnnnnnnnnnnnnnnnnnnnnnnnnnnnnnnnnnnnnnnnnnnnnnnnnnnnnnnnnnnnnnnnnnnnnnnnnnnnnnnnnnnnnnnnnnnnnnnnnnnnnnnnnnnnnnnnnnnnnnnnnnnnnnnnnnnnnnnnnnnnnnnnnnnnnnnnnnnnnnnnnnnnnnnnnnnnnnnnnnnnnnnnnnnnnnnnnnnnnnnnnnnnnnnnnnnnnnnnnnnnnnnnnnnnnnnnnnnnnnnnnnnnnnnnnnnnnnnnnnnnnnnnnnnnnnnnnnnnnnnnnnnnnnnnnnnnnnnnnnnnnnnnnnnnnnnnnnnnnnnnnnnnnnnnnnnnnnnnnnnnnnnnnnnnnnnnnnnnnnnnnnnnnnnnnnnnnnnnnnnnnnnnnnnnnnnnnnnnnnnnnnnnnnnnnnnnnnnnnnnnnnnnnnnnnnnnnnnnnnnnnnnnnnnnnnnnnnnnnnnnnnnnnnnnnnnnnnnnnnnnnnnnnnnnnnnnnnnnnnnnnnnnnnnnnnnnnnnnnnnnnnnnnnnnnnnnnnnnnnnnnnnnnnnnnnnnnnnnnnnnnnnnnnnnnnnnnnnnnnnnaactgtagatctgttgtttatcagccattttcaaatgcatcctttatttgaagctttactcactgtcaaacaactacatcctaaaatggaaaaagaaaaaacaaaattcgattcccaaaacaaactccatgatttgtgttaataaatatcttcattacaaaccgcacttaatgttcatcttcactcttctttattctaagatactaaaaaacaattttcagtgggtggattgttgacaagtaatcacccttcaccacaagtgacctggtaaaattataatgtcaaggtaaaagcagagatcatttccttttcattctacaatatcagcaaagttacataatttcctttttattataagttgttttaaatacaaaataagttagtccaaacacatagaataggtgaacctttttcggtttcaaaagcactttcaggaagcccaaaaaatgattatttgatatttctgcaaaacaagccataccaaacacactttaaatttcttgattccttttccctgttttctgtaatccaaatatgttatatccagtttctgacacacaaaataaattaaaatgaaaaaataagtgttgatctacgtgctgtataaaaaactaaacaactctatgcatatatactacataagacttaaattggtaaatgaccatatgtcaaattatattagatgggccactcaaattctcaagacattcattcttcctcaatatccagttatctagccatttttctcatggagaccccatgactgaattaatagttggctagagctgcattcaaagtcacctttgtgatagcaatttataattgcagacatctcatttttaaggccagaaatcacataacataacatatattgctctcaatttgttgtaactggataaaaacttaaaggaaaccaaatttaggaagtagttgtctggaagcaagtaaagcttcaagtaaggaagcaattaaaattggctaataaacaacagctctccacagttttatctagttaactacataccttctctggaacttgtttatcactgcctccactgcatcagcagagaatctctttccaagcaatttctttctcaagtgctgtgagtgccctgtggaacagagagacaagcatgcttaaaagaaaagactgcatttttacatttaaacatgcacactcctctttccaaaagggaaaagatattagtttactaattattacaaaatttcttctcttagttaacaacttataagcaaactcaactcaaagaaattcattgttaatgacaatttgctaagatgtttctaaaggcatgccaaataagataacacttcgttctgcataacctcattcttcaatataaaaatatacaaacaacttcaatcaagttgaaatttctaaaaaaaatacatgggatatttgtaagtagatagtgactacaatgccaaagtaacacatactatgttttaaatttgtcttttagctttcatgttgagccttggcagttggcactatagtaaggtttttgccttgtgacttaaaggtcacaagttcaaatcttggaaacagccttcccttaaggagataagaatgcatgcatgtaccctccccaaactcaacttagatgaaatacttgacattttcttcaatttcttaatggaagtgttgaaagaaggtaaatacttgacacactgagtaaaacttaaaaaggaagtttcctcaactgggaaaacagcaacaattaactgcaaactcataatagcatggcaaaaattgattttttattgcacttaaaaatgaacaagcattatgctcgcccatatttggttcagaaactcttcaattggattgacaataaagtttataactagtctagcactgaataaattctatttctgggaggagggaaggggagacaacaattaacctagatgcaagtaatttaatagcggcttcctcgacatcacttgtaaatttgtcaatttgtatcaattcctggtcacaagagtctcctccctcatggattgtcaactctccaacctcttccatttgatccaaagaacctagaatcacaaattacaacgctcagaacaacttcacttcttagatatacaagttgtaagtgctgtttcatttctaatcataacgtttggttccgcagcagaatatcccattacaacaaagatagaaagaagccacaagttttaaagagttaaaaacaggttaaaacaagataatgaatgtaaattttttaatcggtgaaaacaaacacacaatgtgtatcactgaatctagaagcatgaaccgattatccatccccaatcttaatggtagaaggagatcgatcctattagaacctggagaaaattaactttagttgaccataagcttctcctttctttcccattattttctaaaaaatcgtcatttttttttttgtaagaagcttatttttattcaatttatcaattacaaagaccatcaatcacaaatcacaatgtatcctcaaaagcgtgaacaatctcttattacttttatggcaagctgagtttatccagtaccacaatataagaacattgaatcaccagacttaaatccgagtcaacaatcccatgccaggcatcaaattgaattagaatgcttaaaatcacaaataaatctattgtatttagctataggtagtagtgacatagttcccctgcatcctgcatagcgaagcacaactaactcccaaatgatgaaccaaaaccatatcatattagatagaaaatagaagtttaccttgttcactgtcatcaaataataagtcagggcaaatttcattcgggtcttgagaaatttcacaatgtgcaattgttgcatgcacatcttttccaccatttatcttgagcacattaacatcaggacagctacaacatcccaggcttttcactggcagtgcagtttcaagtattttcaccctgcaggatgtgctggaaatgcacctaacaggaacagaagaactatagtctcttctcttcaagctaatctgaaacttccaaatactcctatttttgaataccaaattaaaaaataaataattagaacaatggtcaaaatgtttcagaatctatagaaagctgaagcttatatttatatgtaagtgggtggagagacagaaagaaatttaagaacttccttcaacccagtagaatgcttccaattgggtagctaaactagaactccattactcatttactctcacaagaatcaagcttttctgccattttgtttcagtaaccaaagaaggtttagagctaaaaacgagagagagaagttaccgatgagttgaaaaaacgcgacagggaaagtgggacgggattttgaagccgatgtttgccgcgaaacctgccatgttcatgcaaccataatttgtgccttccaaaccaaggggttccccatttttggttcgtttctcctctcctcttttttattttgtcaaaattttgttttcctgtatggggcctgacatttgggtcggcccggattagctctcgtgggctgggctaatttgaatcgggctgatttccccatgacccagttaaaacgggctgtctgggcttggcctgtcactctctgacagtcagcaggcataacatttgtttcctgcacctgcaaatttttattcccaaataaacttttcgaaatgtaattgaaaatgcaggatacaatagctggcataatcacatattcacaacttcacacttgaaccaatctccactcatattttagaatcaatttttaacgagtgataaggaattggatagtatgcatgatattattggttctaactttttgtaggaccatattaacttaaagaaaaagaaaaattaatgagtgtttttacgtggacacatgataaaaaataaattaaatatattttttattaaaaggaaaaatttattgtattaaaacacaagttgttatctaaagtacaattgtaacaaaatatagttggtacaactggatcacctctttttcaaggaatgttaattcttgttaagtagtaatttggtttgacattcaaaaaaaaagtaactatacaaagaaataattatacattcgaaacaagctggcaggagttattgtgctaaaactttttaaaataattagaaacatcaataagatggcatttaatgttctttatcatgtgcccatggacacattatatatatatatatatatatatatatatatatataaaccatttatgtatgtgtgtagagagagatgtttcattctttgtatttttttaaagaattttacaaaatcatctcaagacacaattagatggtattgacatttttaaatgttgttaagtggttggttgtgttataatttggtaaaagtagtgaattttgagtttataaatctaaactaagtacgtgtttgaaaatatatttagttgaatttaacagtcaatccatccttccctttccttctacatttgtgtaccgagatgtgggaaaacttaagtttagaaaggtgtaaatagatttccaagtacaccctaattcagaagatccattttataatttaacttattataggtcataccttaaaaatttaagctagttgtttagttactatttttcctggtcatatatatcaaatagctcaaggaaggaaaaataagaaaggggcaagagacactgttttcaataactcgatgtcaatgctattaaagaaaatgtatgaaaagcaacacctttgctttactaccaaaacagatcaagactttttggagaacacacaatgaatctcaagcaattctccaagcataaagataatggcaaaaaccttgggtggatgaattctcctctagtaattcacttccgttgctacccccacctctttctaggcattctatgctattagaatcgctagtagtttccaaaaagactggcttgaaaacaaagaaagcagggcctaaaccaaggtcattggtgaaaagccaatcatgaacatcccaaaagatttgcacaggcaaattattcaccatcactatttcattccctctgaatctccaatgcaagttcattattctactggccaacatcccatctatgttaatccacatttctggatcatcaggcccagaaagggaagtctcaatcacaacatcatgttctgtcttaccatcttccagaatggctctggtagaaaacattttcctcccatacacattgtctctcttgcacaacaaggtagcctcatctagggatggttttgatttggttctttcataagcatccttctccaaatctcccaacaacagaagcacctctttcttgtaaaccaaggcaacgtaataacccgagcaaggctgtggacttgtggcggagaattctgcatgccgaaaatcccaaaatatgtctactcttgcacctgctatttcaaatgatctaagaccctttttaccccaagattgcccggattccaaatcaatcttgcaggtgtacttgttctcttccaaagtgttgtcgatgctcatggaaaggaaatgattcgtggggtccttgcaccatgaaactgttatacttcgtaacaattctgctactttggtttgataaacaaaggtgacaaaactctgaggggcatctattttcgtggctttattatccttgcatgttgtcttcttcctggaatgtggttttggaatggctaagatcacagattctacaagaaaattagccattggttatataacttggacaagtctggattgagcctgcaaatgtatatgattttcttatcttcttgtaggatcgaaaattgatcctctttggcctccaatggtcaaagagaattataattggtaaacccatcaaagatgcttctaacaatagaacaatgaaccatcatcttaatttcacgccttgttgattcaaaacccgaacagcatcaaaggggttcttaatcaaaggctgaatgactaatgaatctcaatgttgagaatttatgtgaaaattaagacacgctttgaggaacaaaatctaggttgtggttgtcaatgagatgtcacgagaacatatgatcctttttattgcttttatctattaatagattaatgtctctctcaaattgaaagatgaaaatggaaataagttgcacttataactttaaccctactagagccgctttctgcattattttcaacctaattaattttagtaagcgtcatatttggaaaaaaggcatcaaaggaaggtgctggtcgagatgttatcaggtactaatatatggggttggacttaaatttaatatatggggtttgctaatatgcacacaccacattttcagttggtgtgcattagtaaggtgcaccgaaaatttagaataacaactgagatagttccatatttatgcagaggatattagcaaaaccgtgttgtgtgcaaattagcaaaacggaagccgcgattgaggatgatatgtcgaggagggtgcagtgcagatcggaaaacatggcgagagaatttgtttaggagagagaagcacctaataaattatccctataactagtttattagaataaaagataaagttggcttttctgccctaaattttttatgcaccttgctatactaactgaaaaaatggtatatccatgagagaaaaccctatatttatatttatatgccaaaatttataaaaactaatttaatattctgatgagattgaactttaaatttatttctaaagcaataatagacatcaattattatattggaaatcgtcatcttgttgcctccaattcctggttatcctttgaccatttcctctgttttggaattgaacagattgtgagagagagagagtaaaggctcctcaaaatatttcaattctttttatacaatctctcattttagaattttatacaaaaaggtcaagatgttagcatagttataaaaatcggtctaatttgatcgatccaactagttcaattaatactagtgccctgagcattccaattaatataaaggatcgaaaatacattcaattttatttgactcatattaacctaaccagatttggtcaaatatgatgacatagactgagttggctcaatttgatcctatcaagttttttcccctcctatatcatgttaaattgttaatagttaatcattgaataacatataatataattctataatatatatttttatctaataacaatatataataactaattattattatattgatcataatataatttaatatttatgtattaattacatatttaacaaaattacttatgatcatttgataactttttgtatttagtcttaaaaaataaaaaaattcttaataatttaatgataatatccaataaaataataataatttataataataaataattatataatattttatagttagatcatgacaacaaatttaattttagggtgtaaaaatatgaattgagcacattatattagatatattatatatattatatatattttnnnnnnnnnnnnnnnnnnnnnnnnnnnnnnnnnnnnnnnnnnnnnnnnnnnnnnnnnnnnnnnnnnnnnnnnnnnnnnnnnnnnnnnnnnnnnnnnnnnnnnnnnnnnnnnnnnnnnnnnnnnnnnnnnnnnnnnnnnnnnnnnnnnnnnnnnnnnnnnnnnnnnnnnnnnnnnnnnnnnnnnnnnnnnnnnnnnnnnnnnnnnnnnnnnnnnnnnnnnnnnnnnnnnnnnnnnnnnnnnnnngacctaatatttcgatgtcaattttcataactattggttgttagttcttcatttttataaccattaagtacacatgtagcgtcctatagagattataattcaataattccatgggcgagttacgtgagtataaatataatttgactgaatgtgaaacatgtatacgctaaagtctgaacgttgatatgaaatggaatgctaacagtagaagctttctacaaaaagaataaaaaaaatacaggactaatttgtaaaatatattaaaaaaatacaatattttataataaaaaaaaatattcaaccttgtacaattgtaataacaagcttttcaataaattatttttaccttcttccattacttttgttgaatttgtaatgggaagctgaattcataaaatgcagtaaatatacctcttatgaatgtagcacaacacctcaagatttcagaagtataatgacatccaaaaatttaaattacaaacgagcaacataacacgaaaacagaggaaaaggtcgcacaaactgacctcgagacctcagtcaacaaaattatgtgagccggcacatcaatagttgtcactgtacaaaaataaataatataaaaaattatcaaattttaacctgaaatcctcaagagaaaacaaaaaacttcccacgtggcgtagatcggctccttctaaattcaggcaatgtagtattggtgccttccttaagattgcgacctgtaccatgtagtaaaattttgttttcaactttgctggacaataaaggctcagctgcttgcattattcctctgcatttgacaataatactcatttatcaatcaagctttgaataatgtcattttcaatgagaagaaacaaatcaacgagcatagcataattttttaatgattctttaagccataccttgatccaatgttctgagaattcctagagatgttctgatgtatctttttaatatttacaacaccattgactgcagactccatgaggcgtatatcattttctggctcaaaataatcgtttttccgaggtgcctccatggtcatttcacggccaatttccatgtcaaaaccaggtatcatatcagccttttgaatcctaaagggcaattgctgaaaatgcttaaccttggccttactttcagccttgttgttcctagtaccaccttgtcttactgaaccgggagcttgcttgatttgttcctcttcgtgttcttgatgaactttcctggagtttaccttctggaggttgaagagagtttcattagtgttatcctgcttcactggctcctgtgaatgcagattcacccttgaattattctctgtagatgaggccattggcattgtgacaagcgatttatttactagtactctagttggaaatggatgctttaagattggttggttgtctgatgtgtcacttttgaccttgcttttaatgacagaccctctatcagtggatattgatctcctcctgactggaggtgatggtgatctacctttccctgagctcactaatttttcttcagctagaagagacatttttggcatggagtccttctctataaatgttgagggaaatcttgaccttctttgcttacccgaagaacaagttttagcctgtaagtataatttcagatttagagagtacaaattacacttcattgtgataaaatttcctaatataattttacacaaatttatcattaaagtttatataagcatgcaataacctcagagcttctatcatccatgggtctttgacaattttcaggcttcatgttgtcactggtaccatttttgggcaaacggaaaggtgaaacagctcttggtgctttctgagattctatggtatttcgtgcattcccagctttccattgttgtagttcagtttccttcctctccaatgctgatttgatatttgatatctataaaatgctcaaactgttataatattggctaaagttaactttaaaattgctctagttatgaccaaaaaccaaacctcttcctttagctcccgaatttctccagtttctttattagattgagcagcaccaagttcaatggttgcaaccctctctgcaaacttaagtgtgctaattgtttctccaagagcattgacttcaggatttatatgaacaaacatcaaagtttttgcatggccacctattgatatagggggaaaaaacacaggttaagttgttttatacagaaattaaaaatataaaattactatggaatgatccaaatacattaatatcaatatttaaattgcaattcattaatcaacccatttcaaccccttcccaactaaaaaacaattaaaacaacagagggcaaaaatctgtagtagaaaaagatggtggttgaaagctgaaaaagaaaacaatcccaacttttaattttgttctagccaattataatgaggaatgtgtacagaaagaaaaaaaatcaatttaagtctgcttgttacctaatgaatcttgtagaacttgtgtgagcttgctatttctataaggaatatgtggactcttatgtgccaaagcagagataacatccccaagtgcagaaagagatttatttatatgctgggcctcctttagtctctcgccaacagcctcagatttgtccactctctcacttccagccaaatccacaagatggagacaacccttaagaatggagttagacactaagtccctccctctgacatgaactgtcaacacactgcaattggatggtaaagaaatttatttaagaaaaatatattatatggttaaagtagccatcaatatttatgaagaagaaattttacctatgagaacggctgcttcgctcatttagagctgtagcaccaacagcacgattcttctgaccaattttcattaaatcaagaacatcttgagtacaattaactgggactaaagatgcatcaggcacattaagaccattcaattgagagttgtttcgtatatctaatgtatgtcttgttaaggaaatgaacaagccaaaaaaatatatcatattgttttgttttggggggagtatgcaaaaagttttgatatacagaagtgaaaaatgattacaagttaatagaaatacagaaagtatgggcttgaaggatatcttctgttagagccatcgcggactaataaatctctcacttgttcattgtatatttcaatcatctggacgccaacttcatattttatggcatctgctctttcctttgaaatatgaaataagtcacgcaaagccctatagtttacaccccatgtctcttcagtcatcagatcagggccactctatccaagcagtaaaacacacatgcataagaaaaatgataagacaatattaaaatgattttgtgatatcacactttcaatgtggttaaggtttgatcaagtccataaataatacaatcagttttctttgtgctgatgaaaacatatttaataacatgcaggtctttttaaaatttgaattgtctcctttttaagaagaaacatctccaaaccaagataagatactattaaaagaattgcgtaccataacaaatcataatattcttgatttcaagtatccataacatgcaccacaaacagtggacaaaaatctacatttttctactagtacatgaaaagaaagtcaccaatttcagtgcaaaacacataaatcctgatctttcttatgaggcatgcaataaaaacagagaatttagaatgaggacaacacttcaatttaagtaaatgcataaaattgtgatagattgcttctatgtgctagaatttttatgtatgtaatgttaccattgtgtaggtctttcctgacccagtctgtccatatgcaaagatgcatacattatagccatctaaggcggacctaaccaatggttgagtgtcagcatatatttgctctgcacatgacaaagaaaaatcatcataaaagttttgactgagaagatataaatttcaaaaaagattattttatttgtaacaaatacattacataagatatcatgattattatcatttaacaatccagtatacaaatactcgtttttgttcattcttcattacataaccaaatctctattatctaaaacaacatgtcaaaaaatgtccattattattttcaaatctttactacattttacagagagtcatttaggaataatcacatagaacaaagtatttgctggccctatacattttgcaataatatgtcaaaaaattaaaataccttgggtggcacttgttgcaaacaccttattgaatgaaaatacccttctagcatcttttccttgcttatggggattcataatcattatgtttccattgtctcctatataatctacagtagactgtccatttgattgacctggtaagaatggcctcactctgcagtagaccctaatggctcctgtaaggaagcaaatctattaaaatacataaatcatgtaagtggatccttgaaaaagcatctcggattcttgtgtacctttgagatcttgtacttgattgtaaagagagcgattctcctccaaaactttgtggtaggaagaggaggcctcttcaaggctctttatatgattctctaagtagtacatagaactcgacttagcattatgaaagaatattgcattataaaagattttacatacatgaagaatatttttcatggaaaaaaaagtctttggatcattaccaagccttctcaattcttggtcccacttggattgaatttgtttgacctccaatcttatctcgtcatataagtacttcagtttctatagaccagggaaaaaaacaccattacagtgaatgatgctaatctaatacggcatgataaatcatctaaagcagtacattgtatttcccaattttatacctggagctctttttgctgggcatcacttatttcagcatgcttggcagaataactgacattgtgctgattactatcgcgttttccaccgcaagtgcatagtttagagaattcatttgatgccaaactacctctttgatttagatataatgtgatagcttctatgaattctctcttggagaggcaaccagtattgcctttcaatattttcttgaggaaatgtccaagctgcggacaattgttaaattttaggtaaccttacaaacactgaaagtgattttacattacaaacgtgatagcaagacaaaaaagatgcattaatttctgaagtacctgagtgccttgagaatcaagcaatgcagaaaaatcattgacaaccttcctgagcaaagtatcaattacctacacaatttcacccaatcacaaataagattgctgatcacatgaatcaaatgaatcttcatgcatatatttaatttctcaaaacaattttcaaacaacaatctaatttgccagtcctaaaaattacaaaaatcacaccccataggaaaggatcttacctaccattgcattcaaaggcagatcatcaaccccatcagcctctctgaggtaagccaggagaagtttgagtccaaactgatcaaaaacagaagctaaagcattagcagctttggtttcttcaactgaaacctctccagacagatgaagaaactgcgatgactcggtctcatcaacaactctttcagtgcccagtatgttggaagaagaccatttagggaaggaagtaatcctgacagttccaccatacctccacaccccaaccccacccgatagcttccattcataataccctttcaaacagagaatgcagtccacaactttgcttgacgaacccccctgcaaaaaaaaactcaacccctatgatgcccatatatgatacatgtatccaatacgacacaattattctagaaatatataggatacaatacgtataagatacacatatagatatgtataaaaaatcataaaaacataataaatatataattgcaattctacaaatccaaattaagaacatacttcttatatattactaaaaacaaaataaaattataaatgtcagaaacagagttatgagtctaacccagctctacaaaaccaagttttaaggtgaggattactcctcacttataccgtgtatcttggcactaactttagacaatgggagacttcaacatgtctcccttttgcccacagctatccgccatgtgggactttcaacacacccctcagtctaggggtgaccacaatttaggtggtttttccaacaataaatcattgtaatcataaatcacttcctatcctattgtctacaaataagaataatttccatctttggttcatgaaagagacaatgtttcttgaaattcatgcattggacatatacacatagccataggtgaagtatccaaaccgatacgaaataaaagtatcggtgcttcataactcaaccccatcaacaaaatagagcaaagttagtatcttgacgtgaaaggggaggagggtcatggtcaccttttccaaatcggaagcttcgaaggtcaaaagcttcatgtcgttgacggcttcgagaaagtttcgcatgttctcgaaatactgaattgcggactgggcgggtccctcagaagactgaacggcgacgttgtcgaccaccgcattgtcgacaaccttgacgacagcgccggggttgactctgttgaggacgttgcagagaatgagaccgttgcggagtgcgaggcagaattcctcttcggagggttctttggagagtgatgaagatgcgccattgtccatttgccgaagccattctgctgctacgtacctccttgaagctgatctcacaagcacaaacaaacaacatttgaacaactaacaacaaagacatggtgatggcgggtaatgtccaattgtctatacgccaccgcttcatgcacacttttttatttttttacaataacacaacattttttttaagaagagaattgatggtttattcagatgtgctagataaatgttgtgcattattttataataaaaaaaaacaaaattataactttaaatcttgtacacacttcccaattttcacattttagaacaaccttttttacaacaatattagaacaacctagtgatagtctttcaatcaaaatttcattaaaagaattttaaaattgaaaagtaacgctattccttttataaaaaaaatcatgtcaaacttacgttaaatttctttgaggaggtataatggtgattcataagagggaattttttttttgtaaattaataaataaataaatttaacatgtctactctaatttcatactcaagaaatgttacccaaaataacaatattctctcaagaaatgtcgtttactgttatgcttttatatttgtgaattctgattaaacaaaggtcaaagtttgaattttaattaatcaaaggttaaagttaaagtagtctagtcacgattgttatttacagcagtgttgcattaaatgggtaccaaaatcatggtgtttcctgtttgaaattaggccatattactttttgaaaagaataattaattgtaaagtagtgtaataaatactactgtattaacttgactttatttgaatataccatataaaattacttttaaaatagggttataaatttaaaagaaaatattaaacattcttgatttaaagttttacataaataattactgaaaaattaaaaatagataaacctacactaaagtcagttacattcggcagtgaaagaaaaatgttatcccaccaatagaacaagattttggtgggtttttaaatcttaatttcaagcagtactagttcttaaattaatagttgacatgtctttaaacgatcaggcttaaatcacaaaatttgaataacaacgtcaaagacccacgccaccattgaatgctggtgtgctgggggagagtgatcccattttagagcaacacaacacatccccaggcattgcataatgcgctttataattttgtgctccacgatcttttcatttgtcctctgtccctttctttttctcttttccagcctcactttgtttaatctagttacaataattattcattatttgtctttttttttatacaatactttttttcccttttcccttttcttaaacaaagcaataatgtgcaagtgcaagtaataatttagtagatagaatagaaaagaaaatgtaagaaacaaatcaatttcgctaagaaaaccagaggaaatggggaaaaaacaaaagaaactttttctatgaccataaagaaacattattataatgccaaaaaaaaagagaaacattattgtgaaacaataaaacgttgttctcttttatttaagggtgttttttttaattatagggtgtatttttaaaatgagtatatatgaaaaatattattaaaaaaaaaaagagagtagtaaagatatttatgttcaaataatgaaacttttccaagaaatgtgcctgaattcaagcaacaagcatgtttcattatttaatcttaacagaagattaagtctttttttgcggagtattagtataagtatcacttgttcattattcctaaatgggtctttggatttatgttttttagaagaaatattattaactatttcaaattaaacacagatagtatcagtgctttctagtttcagtgagctctaaaactaagttcttactcccctgttttggttcaatcttgggggacaaccttaaattcctatgctctcaaagatattattttcagaatacaaatattaaaaagtactacctgataaaatctaagttcccaactcatagtttatttgtgatgaagcattaggtgcaattacgaacacatagcgagtgtaacaagagaacagtgctaatgtgcaatgacataatcgtaatcaaagttgatacctgcttcctctgcttttctctgagccaattcatgatcgttgatggtatcctccgtcaaactgtgtaaagtctcattgttgttacatgctgaagccgccgaacctttcaaattcaatcctctcttaagaggagatatgaaattagagtttggtaaggtttcctgtggcatgtttcctgcaacaccaacaattggagaaatgcttcaatgcagttcttaatatactattagaatccaaccaccgaaaaataaaattcaaattgttttgggtttaaaaagaacttggcatttaaaatacctgggaaagtgaagctttgggttatgaagattggatctgaggcagaagcgtgaggagaaacagggttctcgtggatttgatttgatgatgaatgagcgttaaaaaatgcgaagaggcttatattaaatgcttggtttgaatgtgttgagagttgagagagaaacagaaagaaagagaacttaaaacaaaacaaaaacaaccttaaacttgaacttgcattttgaacgttggtgtctccgtcactcacgtgtcctcgggggatcacaacgtcttaacggcgtatgtatccgatgtggcgtctgattaggtggcaactgtgggcctctgtgggacccaccgaacggcacgattcgccctgaatgacgtcgtaccaatattttttgtgcctttcataacttttttgctccccaaaatttgctttcttttaacttttatgagttttatttttgttttaaaaagaaatagacacaattaatacttgggtgaaaaaatataattaaaaagagagattatggcaactgtggcctgttgtcaacttaccacagttaaatttagtttatttctgtaacttaccacagttaaaaataaaaattcatagccaagagagattacgggacccaatgttgacgggaataaaggcatatgataaaactatattctatccaggacatgcgttagatgtggaaagaaacatgagagccaaaatgttccaaaattcaaacatttttccgaacgttgattccccaatttagatagggtagatgcttgcttttttatttattttatctatttacatataaattagatttttgtacaagtattattgtataatttaaatttaatttattattttcatgtttttattatttattatcattgtttaacttctctaattatttagttccgtccttttattgtgatgtttaaattatctattttttaccgttttttttattaatttctctaatctttttaatagtgcccacgcttctccttctgcaaatgttagacatgggcctctaaaattagttcgagtagcaacaactcttccatggtgatctcggatgcaaaccctctaatcttagttcattgttttaagtcacataaaacaattcatattattctgtttatttttttatttatataaaaataaaacaatagcttaagccatttatttctttttaaaaaaaataagaattcattttttttattaaagacaaaaatctttaaacaacgaataaagtattttccattgagacaccaggtctgtcggtccgtccacattccaccacttttttcaagaaaaatttcaaagaagtattgtttttattttgtttaatggcagatattttttttaaagttttcttgtttaaagtactgtcagacaaaaaaaatatatttttactatatatttttttattttgtttttaatatccttgaagacatttaatgttttgcttttgggtccataaaattatttatttttgttattctagaatgaccatcttgggttggtgcatttgatacatgatgcttataaacgtttcaggtccaataacatattcctggtgtaatatttgttagatagagaaaatgttcaaattagcgcctaagcacaagaaactatttaattcaattatgacctgtgggcttattctcctaaggacataactattggcaccctctcaattactatttaccacaatacattaaaaagatgcatatacccttattccttcctgtacccctcaattaagacacaccttagttagaacacccttcaccccctttccctcacttcttagtttttcttctaccttcttgacccctttattgttattggtgtcacgcccccttttccaatccctctcttcccccattgaactttccctccatcacactctaattttgttgaatcaaagtgttttaaactccattgattgtgacttcacaagagagcatttcaagctccttttttccgtcttaaagatttgatggaacttgttttcgttatatacctaaatgaggtgcacaacaaaaataagtttatgtgatgtacctaatcaaatacacaacataaataagttttacttgtgtacttggaaatcaatgtatgtttttatatgtttattaaatttatattgatttgcatgttgttatgttgtgtacatcttatattggacacataagtcaagtggggctctagggaggacatgccaaatctatcccaagttgaacgagtaccactgagagcttcaatttgtagacataaggctatggcaacacaataagagtgacaagctgccatggctaatgatacaaagcttgactacattgttgagccaggttgctcatgcatggaggcgcaagaggcatcataaccaattttaacatttattaatattttttttataattcaagattgatctaactcaattctacaaaatcaatttatgaggtgaaggttactcttccacttatatatttttatttgtcaatattattagttgatatgagatctcaagcatcttttctcatgtagaagaccaaacatctcaaatgtaatatttgcatgatttaacatttgtaattggtctaataatgactcattagtgaatgactcaataagtccaacaatgatcattgggataaatttacatatcattttataattgaagtttcagtctaactcaattgtataaaattgactcttaaatataagttatttttgacttatatattttaatttagtcatattactaattgttgtggaatcaccttttttttacataaatatgaaaatattagaacttatcttttccataatttactttattgatatttttattatcaaacttaataaatataaagtatgaataaaataaaacattaatattttttaaatacaaaaaatattaataaagggaaacttataaaatacatgtacttattttaaaaggaaaagaaaattcatacattaaaagaaaatattacataaataatttaatgaaattaattaaaatcttaaaatgatattatctctaattttatatataagaaacatatgatgaatcattaaaataaaataaaaaattacatttaatgttatcataaattcaaattttattataaaaatatttttaaatttgaatgttgtaagtaataatcacatttaatatcagcattcataatttaatgaatgaatatctagtaaattaaattaataataaattaaggatatagatgaaagttaactctaaataaatttaaaattaattatttttagaggatttaaaataataattttttataattaggacgaaagataatatcaatctgttgcttacactatccataagaccagagataatagtagtactccattaaaataatcatgccttataattattggactaatacaataattgatcatttgctttaatagtatagttaaagtgttaaacacaagagaatactctcgatttcaacaatttcgattttcaaggcatgaatgaatcactgtgaatcaggcccgagacgtggatgacaattagtgggacccaagtggagacgggtaaaatgagaagtaagacggaaacgacatgacgtacatcaagaataatgtcatatttattttataacaaacaaattacaaattaacaattcttttattttctaaatattgtatacaaaattcaattagaatattaaatacacatatttaattttttatgaataaataatatattcacaaataatagtacaatcttttacattatattcaataacaaattactatttgtaatttattgatttttaataattagcttaagagtcataaaaaataatttttattatttgatgatataaattaattatactgactacggatgtttattaaattttttatacaattaataagtttaattttgattaatttattatatttttcattctattaactaattaaaaattacatttaaaatgcttattataaaaataaataaattaattttgatgtgtagttagtcttaaattttttacattactaatgaattaattttttttaagattattaatataaaacttaacaaannnnnnnnnnnnnnnnnnnnnnnnnnnnnnnnnnnnnnnnnnnnnnnnnnnnnnnnnnnnnnnnnnnnnnnnnnnnnnnnnnnnnnnnnnnnnnnnnnnnnnnnnnnnnnnnnnnnnnnnnnnnnnnnnnnnnnnnnnnnnnnnnnnnnnnnnnnnnnnnnnnnnnnnnnnnnnnnnnnnnnnnnnnnnnnnnnnnnnnnnnnnnnnnnnnnnnnnnnnnnnnnnnnnnnnnnnnnnnnnnnnnnnnnnnnnnnnnnnnnnnnnnnnnnnnnnnnnnnnnnnnnnnnnnnnnnnnnnnnnnnnnnnnnnnnnnnnnnnnnnnnnnnnnnnnnnnnnnnnnnnnnnnnnaataatgtaaaatctccttcactggttggggaacaatataagagagtggaaaaaaatgaagtatctaatttttgtacccttctaacgaaggatttgaagggatgaagagagaatttaaataatttaaagtgtcctaagacgtaaactatcccaacgttttaaaatttaaaattataactgcacgaaagtaaattaatctttaaaatttcatactctcttatgaaccaaataaaaaaaaggctacattgatctccttcctttattaaaacctttcttctcccattgtctcacccaaacaaaatgtctaattaaaatctcctctttctctcttcattaaaatcctttctctcctttgaaccatttggtctcaattagtccctttatattgtgagagcatacattaatacactatttactataatcatttagtctcaatattaattagtccctttgtgttgtcgtgagagcatactttatacactatttactatatatatatatatatatatatatatatatatatatatgtatgtatgtttgcacaatggttattctgatagttaaaaactaattcatttcttctaaaatttagatatcactgaagtaagttttattttgcataagaaattatttttcaaacacaattagaaaaaaattaatcatctttaacactcacttcctctaaattcaaatggaaacaaaattaataattttatactatttaaagttgttagttaatttcatttaaaaaaagaactacattttttaactacttttaatcatattaatggaagataacttttacattttaattgaattaagaatattcttataataataacttaaataatattaaattagttgatattaagtccacgaaaaatattattttgctataattcagttcattaaattggacattcctttcttaaatattttttttgagaggtcctttcttatatttaagtccataaaaagtatatttttttgctgtaaaactattgatatttaagattaatatacgagacatcgaccaacgtgtcacaatttaattttttttacccaaatgccacgcgaacaatagtattttctagactgtcactccacctatttcactctaaggcacagcgaaataagtaactgacgtggcacaatattgttgatcgcgtatttcactggagccaagcgaaatacatgacaacggaaaaaaaggtgttggaacacgtgtcacgcatgcatgaattggtggtgatattgattatataaacttcaaatggtctaacttttgataaaaatgtccgatcgagacgtacgatatgtcaaaacgctcaaaaataagagaagtaattaaaaaaatgaaaataacattaaattaactaattaaataattaaataattaaaaagtagaaaaaaaatgaaatatttggatgattgaatcctaaatcctaattttcacatacttagaggcgttttttggagaaaaaaatagttgaccgaatccctttcgggaatttgcctaggcctttttttctgaatttcgagcgttttaacatatcgtacgcctcgatcggacgtttctatcaaaagttatgattgtttgaagtttatataatcaatatcaccaccaatttatgcatgcgtgacacatgttctgccgttgactgcgtatttcgctggcctctatagcaaaatacatgaccaacaaaatagtgccacatcaactacttatttcgctgaaccttggagcgaatagatggcatgacagtatggaaaatactactgttcgcgtgacatttaggtaaaaaaatttaaaaattgtggcatgttggtcgatatatagtatattaacctagattaagacatatttaataagaataaaatattaatgtatttagttagtttaaagtaagaataaattaaagtataataatattaaaaaggaggtcacatattaaatgacattttaaaaaaatgtgtaaattattaaatatgaataattctaatctaattaaattcatactatcagaaatgaattttaaataattattgtttaaaaataatgaaaggtgtagaaaaggaggaaaaggcattaggcccgacatgagattcagtgtcgaggactcaaggtggatgctcaaaatattagatactgagggcgtggggccctcaaacagaagacagtctagtgagtgacatttccacactgaaacatagacacattaagtcattaaccacaccacacgtacccaccaccccacactcccctgtccctgtctctctaccacttccatacccatacgctacgtatcctatttgattttccgtttctctaatctctaccaatttccaatacgtgttcctacacattcttctaagaaataaaaaaaattattttaaaaattattatataaaatatggtattccatgatttatttatttcattttttaaaaaatacacttatggttgtgagaaatatttttttattataataatgatgtgaaatatctatcaattttattaatgactaatttttatcgaaaaatctgatcgatcattttaataaaaaaaatttaataatatttttttattcacaaaatttaaatatgagaccttatttatggtgaccaagtaaaaatactcggatcaactacttgttgatattataaggagtattttatatgtgtttgaaattatgataaaaattagattatttgaataatcaattatatgtttagttaattatttgtataatattatgatcaatttttatttgagtaagtttgttgaaaagtgatttaaaaataattgatatttttgaatgcaacaaaagatcagcttttacgtaataaaatagtataaaaatagccgaaacaaaaaataagctgtaaaaacatcttatctnnnnnnnnnnnnnnnnnnnnnnnnnnnnnnnnnnnnnnnnnnnnnnnnnnnnnnnnnnnnnnnnnnnnnnnnnnnnnnnnnnnnnnnnnnnnnnnnnnnnnnnnnnnnnnnnnnnnnnnnnnnnnnnnnnnnnnnnnnnnnnnnnnnnnnnnnnnnnnnnnnnnnnnnnnnnnnnnnnnnnnnnnnnnnnnnnnnnnnnnnnnnnnnnnnnnnnnnnnnnnnnnnnnnnnnnnnnnnnnnnnnnnnnnnnnnnnnnnnnnnnnnnnnnnnnnnnnnnnnnnnnnnnnnnnnnnnnnnnnnnnnnnnnnnnnnnnnnnnnnnnnnnnnnnnnnnnnnnnnnnnnnnnnnnnnnnnnnnnnnnnnnnnnnnnnnnnnnnnnnnnnnnnnnnnnnnnnnnnnnnnnnnnnnnnnnnnnnnnnnnnnnnnnnnnnnnnnnnnttgccttttttgaattgattttctttatgaacaaaaattaaaatttgaacccttactcccttagttacttgctcaaggaatataaatccatcaccacttaacccattgcttgttgaacatttgtttaaaaacttaattgcacttttgattttctaggtattgtaactaacccaaagtaaaataactagaactcaagcttttgacctactggcaatttatttttatagttttataaagtaaaaaagcctcacatattaataaaaaaatcacatgtttttaacaaaaagacctaatatataaatctcattcggagtaaaaaaattcttaaaatttactttaggtcccacacaacgttggatcgatcatcattgtgcaattttgattccaaatattctaattacaaaaatgttgtaattgcatgattttggtcttcccatcaatcttccattattacatttctaatagaatgtgttgacataacattgacgtgataattgatatattgtctaacacatatgttaatatgacttatgcatttttaatctctcacagttataatgcttgatagactagaagtataactaagctatgttaatataagtgaaagacaatatgttaattgtcacttcacattatcatcctcaacttatgtgctaccgtaccaaaatttattagggagagtttgtttcacgaatttaattatattctttggagaatacttgtgactcaatgtgtgcaactaaaacctataaaccaaaattacacaattaccctgcaggataaaaaatgcaattaatccttatatttaataagacatttaatatattttttttcatttgcattatgaacacattaatgaaatcgatcaatagttttaaataaactttggacattagcacttgttcatattgattatatttggtaaaattagctgaaaaactagttaaaaactaaaaaattgaaaaattagttgatagttaaaaattgaagacttttaagttaatttactaaattataagtgtttaataaaattagctattaaagtaatttaaaaatataaaataacataaatgacatatttaaaaaggataataagaaaattgaataaatattttaaaaaataatatatatatatatatatatatataatgctagaagttagcatttaaaaaaatattatttcaaatagtattttaaaaaatattagaaattacttgaaagaaagttagaaattatttaaaaaataagtacttagttagtaaaaaaaaaatagctgaaatgattagtccaacgtagcgcatgtttttgggtgaagcagtgtagtacttgaaattcaggatggaagaaggtggtaatttgaagatcccctgaagatgaaggtctgtttatagctcattgcctcattggacgtcactatatatatataaactaaaagaaaagggtaaaaaggcagcgtctgatagtgcaccaaataaagcatcatatctgtctgtcactatatattttccctttttctttctttctttcgctccgttcctctttctctatttcgtacaattctgagttcatcaggtacgttttgccatcgttcagcatttggttatttggtcttctcgtctcctctcctcatttaactggatctggatttcttaactttaaactgcattcattcatcactgctatctctgtctttagtgcaatggctgcgctaattcgctcacgttggaactgaaccagttttaatttatctgtttgtttgcactttgcacttcgcacgcaaatatatatatataaaacctctcactgactctggttggatggattgttacgtgcaccgcatggtgatgatatcatgtcttttgttcatcggatcggatggaagcgtgtcatgtatatgtcgatgatgttctgattaatttgatttgatagatcatggcgtggagataatgagattggaaaataatttttttgtccattacttgaggaatttagattaacactttggttttattgattaaaaaagcccttggtatatatgtagatggctttaggaagtgatttttttttttatcgataaatgttagttgttagttttattagtatattagtgagagtttggaaaggaattcgaattaacaacttctgtgaattcttcctttaaccacaaagctaaccttataattcctgaagtgaacttgatgactaatgatgcctcctaaagggtgaatctgtcttgagcagtgttctactggctagtcttttagtgaaaattagtaacattaccaaagagtgaaatggttggcttgatccaatcagccaaatttgcaagctgttaaaactattgttattcatattcttttattgagtagtatttgtatgttattgatttctctatctgtgattttcaggtattatttatccaggtcattgcttatgggcactaaatcagctgttgacttaatggagtctttatccgaggttcatttttctggatttcacatggatggcttagagcaaagaaaggctggcacagagcaaccaaccacttcagcaactgacatatataaacaaccttttgtgataggtgtgtgtttttgcattccaagctgcctatgtagtcataaattcctgatttgtctataattcaatgttggtacttggtacatttactttgtcttgtgtttgttgggtatcatctaatgtataatagggtactaaatatattaagtttttgggatgatataaactgaggttctagagcccatatgtggattttgctgttctgttatggcagagaaatctcagcagctttctttttcctccccgcatttgcatatgattccattgagccattagtttttgtgtttaagtgaagaagaacaaagttacctttgaagactatcatacttcacaatttattttatcttctctaaaaactaattttaacttaggcataaattaattttatcttatgagaaaattttatttcatgttttctttcataagtacttacggagaagttgaaccaaataggatctagtccacgttattgcatcacaatttcatttcagctgatcattcctcttacttggtcatcctacagtttggaaattgtggttaactcacacagctaacaccttatcatataaaagtagagcttcccgcaaacttacatacttaacattgaagttttctttgtttcaaagtttagaagcacgagttttgaaaataagatcgtaacaactttgtatgacttaatttcacatcttaccaacttttatttggtatctacggttctaattcattttctatttattttttggtttgggtatgtgacaggtgttgctggaggagcagcatccggtaagacatcagtttgtgatatgattgttcagcagcttcatgaccaacgagttgtacttgttaatcaggtatctgattcttgcaaagtaccaatcgtctatctcattttggtgtagattgaaatggtaggaagagattagaagaaaaaaagaaagataaaagagaaagtaaatgtaataaatgatgaggtagaaaagagaaaaaaataaagtgaaaataatatgaaagagagagcatctgtatgcttgtaataaccattgattttttctaaacgtactggtgaatggcgatcaaattgagaatttataactatataagtctgtgagtcagatattaagggaatacaactaatagtttgcggttaatgcttcaagccttataagcatcctgtatcctccattatctgaatccccttggtattttgttcggccttatctattggaatgattttatcatctttgttttgtattttcattgcaacattgacatactattggctaccattcaccaaaatttctccacctctttctttttcaagtcagattctgtattatgttgttctaatcacctcttttatcatgaacatgtatgtgtttctccctcaaaatttccatccaaatatcaatgattttctcaacaacagaacacatttgaatacaccattttttagttgacaaaagtaaaaaattctttggatgtattttctaacatttatgctgttaagccatcttcaatggaattgctcttttggcattagaagtgtctagtaactcgagtcttattcttcggatgttggagagcaattttcatgggttacaaataaagcaccgttactatataaagcaactagagttttctactttttaatggactctaattaattttatatattaaaatattagatacttttaaaattatttaattaacaaataatttagatttgtttattttttataaattaaactgttttcataatatattactttatattttttcacattaaaaatattattaatttataattggttttatttatttaaattattagtacatagtattttccaagtattctaaaaattaattaattaaaaattaatgcatagttatttggaagtgaacattttatggaattaaaaattattatatttatttcttactaaaacaaatgacataaaaatattttaaattaaaattaagatgaataataaaatataaaagagcaagatcaattgtggagcctactttttagagttgatagattggagaaattttttattgaataattaaagtcataaaacattatgtcagcgaggaagtgaaaaattataagtaatagcaactcgtgtgacttgcttgaagaagatgccctttaccttttatttatttattacatattttacttgttccctttgtactttggccttcttttatcttttttgagggtatgtgttccagaatttgggttgatgtttcttatggtacatgatgatacgttgagcgtaataaatgaattatttattgtacaacaggattctttttaccataatttgactgaggaggaacttacaagagtacaagattacaactttgaccatcctggtcagttcaattgtacccattagtctctcattattaatcagtaactttctctttacattaagacattatatagcatcatcactcaggagaggattggataaaaaagtccggagctacatcaaaatccttctttagatagtcttgtttttattgtttcggccttgtcttgggtccttttataaataaaaaataaagagagagaagaaattatacaggatgaaacatgcactaaatttattcggatgcttgttttatttcctttattttaaatctacttattctcctatatctggagttctgtttttcctaaaatgctttttgaggatcgggttagaaagcctaaaataatattcaggttttagtattcttttgtttttatcaggtcttatgtttttacgtagatacttaaattttttgcaaaacaagttcaatacattcaatgagtatcaactccatctttcttactctcagaatgcttcaggaatatcaagggtggtgtcagggaaaaattaacctttgaaagatgtaaagcagaatttacctcaaaattaactgattagggacatgaaagtgttaatgaaattccagagctagaatattctcgcatttagcctagagatgagtatggttggtgagaccactgcaaattttacatgtcagagtgttacaaattgtgttatatgcattatgagccattccaaaggttgaacaaaagttcattttgtatggtacgatacttgagtacctagcaagcaaaattagtataatacacctaaaaactgataaggtagcaacttttgatatggaaatgttaacgtttaattttttatatatatgtgaataatggttcttagactgctatagctactttattcctaatgtatgttgttgatgtcatcagaagcttttgatactgagcaattgctacgtgtcatggacaagttgaagcatagccaagcagtagatattccaaagtatgactttaagggttacaagaatgatgtttttccagcaagacgggtatatggaacattcaactttttattagtaactttactcctcgttcttgaaatgcttaacagaacaggccaagattataattttctattttgagtttttattatcatgctaaagaatagtttttttattgcataggcttgacatgacaatgtttttcatagttgaatatgaatactttgatgtactaatgattgccaaatgatgcagtacatgtttcttcttgcgttttatctccattagaggggaaattatatggaatacaatgtcagccatacttcccttttatgttggtttaatgtgttttgcaggtaaacccagcggatgttattattttggaaggtatccttgttttccatgatccacgagtgcgggcattgatgaatatgaagatatttgttgacacaggtcccttattatttaagttccaatataacttttataacttactgaattgtatttttctgcggcatttcttactatatatggatctgttgtcagattcattttccttttagccccatggacttaaatttcccccctcctaatccacattatgatataggagaacgcatattcttaaccttatcaacaaaaatgcatattcaagttatgctaatgacactatcttcatctttttttccccacatttatttgttggtttctattttattaataattgcctacgtcttccttctaactatttacaagcatgcatattttatatctcattgttgcactactaagttatgctatcactttacattgtgaaatgttcagtgcagatgccgatgttcgtctggctagaagaattaagcgtgatactgctgacaatgctcgtgaaattggagctgtgcttgatcaggtagctaccgtcagccacaccatttgcacttccattatcatattttgattatcttctggtttttttgccttcacgtttcttacttgtactgcatttcaagacttggaaatgttattttagttcatgttgctgagaggctgttatgaaatttcattgattagaaaacatgtaagaagtcagtttttatgaaattaaatctttaatgatctgttttgaggttatgattataaatcaagctaacatatttcctttttttatgtttaccatatattagtaattccatttttttgtttaccatatattagtaactgtttcttataatatatacttgatgcagtattctaaatttgtgaagccagcttttgatgactttattcttcccaccaagaagtatgctgatatcattataccccatggaggagataatcatgtggctattgatttgattgtacaacatattcgcacgaagcttggtcagcatgacttgtgtaaaatatatcctaatttatatgtcattcagtctacttttcaggtacccctttcttgttatttatcgtctttatcaatcatcccatctttccccgttcatctggaacttccaaattcaattttttttatattaaaagttgaataatcacaataattgcttcgatgcagatacggggtatgcatactctgatacgtgattctcaaacaacgaaacatgactttgtattttattctgaccgtttgattcgtttggtatgtaaatggggttcatttgtagctcttaatattagtgatggcatggcattttcttcaagcactaatggtcaaatttcgcccacttgaccaggttgtagaacatggcctagggcatcttccatttacagaaaagcaagtaaccactccaactggtaagctgttctttttcaatgatggttgcctttgcttgtattttatgtgcaactaaggatgcaatattctcttctcattgcactagaaagtgttgtggatgatgtgcctgttgggtatctctggtttctaaaatcctgccatattattgtcacaaaaatgagaagtaacatgaactacacgtttccagccttgttttagaattatctatgtcttagaccacttgaaacttccaagttgtccaagacatagttagacataattcagccaagttggaaggactacgaataacttctgctgtctgaattcccaatctaagacatgcttcatataatgggaaccaaaggggtatcacgttattttacagtagagacacatgttctgttcatgatgttaattgctgcgattgccatactgaaaatgattaactttcctgtctgcatctttgctgatattctccttcaaatatttacaaaatagaattagtttgtttcacgtcttaacctttttatggttacagctaagctaatacttgtccttcaatgcaggatcgatatacagtggggtggatttctgtaagaggttgtgtggtgtctccatcatccggaggtatcgtttttgtccagatcagaagtcacttgggcatttgtttaaatattgttatccttgctacaaagttttgactaaaatactttcttgaacaattcaataaagagaaagatctattgttgatttgggtttataattaccaaattgtttagattgcatatggtactctacttgttatccttgaaaatattatccaacccccctctctatattctaagaaactagttcttctttcctaattactcagtttgatgtgaacctatgatcattgcaattttttataaatagaatttgtccttaaatttgatatgcaatctaatttcagtggggagagtatggaaaatgctttacgagcatgctgcaaaggtatcaagattgggaaaattcttattcatagagaaggtgacaacggtcaacaggtttgtcatttgtgtgtgcttgggtatactgttttgattcatttcatgatcactaacttatcctttttcttttttttttggtgattcactaacttgtcctttgattattgagcagctaatatatgagaagttgcctaatgacatctcagataggcatgtattactgctggatcccatcttaggcacaggtttgtcattctcgtaatgtttatttttatggtgttttttatgttactggtttaaaataatataagtcagtagccaactgcgacttaagttacatagcagttagcataataagggtatataaaaaaattgatatttaatttgtttgttttcattttgattaactttagaatatctttgtctttaggtaattcagctgttcaagcaatttctttgcttttaaagaagggtgtaccagagtccaacattatatttctcaatctcgtatcagtaagttacttgtgcctgttgttgttcctctgtatatcatatatcttgccatttctttgttattttctgttgcttctttcttttcttgtacctaatgatttgcatatatatatatatatatatatgttctcatattgccaggcacctcaaggtgttcatgtggtctgtaaaagatttccgagaataaaaatcctgacatctgagattgagattggtttgaatgaagatttccgtgtcatacctggcatgggtgagtttggggaccggtactttggaacagataatgatgaccagcaggtggtacccccttcacagtagttatacttgggaggaaattcacaatattttttggttcgtcatcattaatgagacttttactgcggaagggggcaataaaatttgctgaattaagattctgctgggctccgagttattgttctaaatcaattttgatcataatcttttgtttgattttacaaacatacgcataatcggaatattccaatgcaaattttgatttaccttttattattataccagaatttttctttgaatttattctttgccggacactggcttatcaagatacatttttactgtccagagatttttacttcatagatataaatgattatgtaagttctttaattaaatatctatcactctcaaaattgagaatatatagcgaggataaattgcatgaagatgtaacttgaggatggaacttgattctgaaaaaaagacaaaaaaataaaaataaataatgtggctgagacattgttctgcaaacaattttcataagagcctttaggttgatatcttaatatgtaaagccaagtccaagaggatgacgggtgagagctttccacaaaatttccttgttatatatcatgaggtgagttgaatatatattattgaaacggatgaggtgccacttgggcaagggaaggatcactcgttgctttatccacgagtgataaccttcgttaggctaatcactggacacgtggttcctttgcatgggttgggtagaatactacttggtatattcctttgagatttttatctatatagctttggtctggctaaactcctttttcgtgctgtcgtctgttatctgtttcccgccatatatccaataagctttaaccatgtctgcctttgttggaaagtacgcaggtagtatctcatatctcctcctcttctcttaatattactcactcttacatctctcaccaacacgtaaacaagaacaattcttcattgaatgaagtgcaagcttgtcaaacattccactttaatgtactggttaacaagaaacgagtaggcgacaaatgcatcatgttctcattagttattggaacataatatcaaattataaaagattcattcatgtctaagaagctcattcgaaatctttatatgtttacaactcttagactttggtttccaaatgggatgtatgttataacttacatcaattccagatgagcttatcaagaatgccaaatacatagccacacctgggaagggcatcttggcagcagatgagagcactggcaccattgggaagcgcctctcgagcattaacgttgagaacattgaggcgaaccgccaagctcttcgcgagcttctcttcaccactccagatgccctccaatacctctctggtgtcatcctctttgaggaaactctttaccagaaaacctctgatgggaagccttttgttgaggtacttcaagagaacaatgtcatcccaggtatcaaagtggacaagggtgttgttgagttggctggcacaaatggtgaaaccaccactcagggcttcgactctctcggagttcgatgccaacagtactacaaggctggtgcacgcttcgccaagtggcgtgcagtcctcaaaattggcccaactgagccctctgagctttccatccagcaaaatgcacagggcttggcacgctatgccatcatttgccaggagaatggccttgtgcccattgttgagcctgagattttgactgatggggctcatgacatcgccaaatgtgcttctgttactgaaactgtacttgcagctgtttacaaggcactgaatgagcagcatgtccttcttgaaggaactcttctcaagcccaacatggttactcccggctctgatagcccaaaggtaactcttaacattttcaaaatcatacatccatatgtatggatacattctatagttgaatacttactagtctttgaaataaaattggaatgaagtatggtgcaatattgttgacttcaaaagatttgtggcaccttatatgctatttgacacagataaaggaatagtagaggtatgataaatgatatgatgtgataggaaaagagaaatgattggtgttgatggagcattagtaatttaagggtgtctaaatatcattgttcgattaacttggaagcgaacgtgagttggcaccagtaattaagaatctggtcggttcgaactctcacctttcacataggtatggattcaaatttccttgacgccactttcttgcttggtgtgcaaccttcttcaggaagctctcttggagcttagaggctagttaagtagttgcaattaggtgaaactactggtgtctttcagttctaccacttttttgaagaaaaaaaatacatattattaacttcgaaaagaatttgtgtgcatgcaggtaccacctgaggtgattgctgagtacacagttcaagccctccgcaggactgtcccagctgcagtgccaggggttgtgtttctgtctggtgggcaaagtgaagaagaagccaccctcaacctgaatgcaatgaacaagttggaggtgttgaagccatggactctctcattctcatttgggcgagcactgcaacaaagcacactcaagacatggggtggaaagaaggagaatgttcccaaagctcaagaggcatttctggcaagatgcaaggccaattctgatgctactctgggaaagtatgttggtggaagcggaagtgggttgacttctgagagtttgtatgtcaagaactacaagtattagacttctaagagtgtgtttgtttctccttttaaaaaccttaaaaacgtcaatccatgcttttggttcagtcacgttgaggtctataagaaagcatgacaatggagaaacaaacatactctaaatggacttggggactgatttggggtgggtgcattctggcatatgtatgatacagcctaagaagcatttgcttctgattaacatgcttatttttgggttacatatttttacaaatatcagttattatgttataggagccaattttaatgtcaaatggtgatggcgcgtaccactaaaaaataattgttggaaggaggctggtatatattgtcagaaacagtaatattatactttataaaatgtgcaattacttaacacaggatgatggaaagcagtcaattatattagtccatgtaaatgatgtaataatggccgcatacttttacccgtcgaacattctttagcagcagatagaacaaaaggaatttgaagaaagaaaagaatcaaagaaaacaaaagaagatttgctcaaatggacatttatcaattatcattgtatctcctagttactgtatgcacctcttacaaattaatgatttagcttcagagaattcagataattaattttctacaaattgtatttgatagctcaaaatccgctgtggtgctaaccatagataatagtaatgtcttggtgagtcactagtcactagttatacaaggaaattactttttgtgtgtctctctctatatataaatatttggctctatgctctagagacattttcttttatatgttaacatattaacatcagtgcaaattattattgaattaattgatgattaatttctgttcaaaaatctaattgatcactttagtagaattttttcttctaactatattttttttatccacaaaatttgaactaagactttacaagaaatcaaatccaatatgtttacactaacaacttattaattgcttcagtgtcctttgagcaaacacgtatttactttttttaggcttgttattttatgttgaaggatcttgtggcccgacctatgtccattgtgttatggacatatgaatcccttatttgaattctacatgcaccttccaagttccaagcaattcaataaagaccaaattagccttaacgagtccacctcccttccccaaccctaacacctcattggctcctacgcccatctcattccgcccaagtgcccaacctaacacctcccaaacctcgaaaagtgtgacaacagctttgcaaagccctccttcaccctccttcctttgtacctttcaaagtccctgcacggctgcaccctcctcactgaaccccgaaagcatcatcaaaatgggtggtgcaggattcaaatgcctgctttgaaaaaaaaataagaaaaactaacgtagtaaataacagctaggaagattctggattaagagattattttagtgcagctaacacgacaatataaaaagaaagtcggttcaaccgagccggcttttctgacatttggggttgtgtccacacaagtgtttctcatttgatccaattcttttgccttgcctcgcaccttctcatctcaaaaaatacgcgtttatatgtgtcataatagagcagtagatttccacgcctccgccaaaccacattcactgtttcacttgacatggccgatgtaataagttttactgagctagtggacaattcgataaggagtagtagtgctagtgggtcagatgttggagcatcccctgtccatagttttgctgagctagtggacagtgcgataaggagtagtagtgctagtggatctgattttggagcatcccctgtccatagttttgctgagccaggacatgttgctgctgcgcaattattcagccaaactgagcttcaagcagccaccaacaatttctcacttgacaacaggattggtgttgttcatggtcgtgagatcgcaatcaacaagtatcaaatctggagatactggtttcgtaggcctaaatttaccttacaccaaaacatagttttacaggtacaaatggactgtgagggatgcagaaggaaggccctcaaaattgcgtcattgacaaagggtacctttattttgttttattaattacaataactagcttggcttattattaattacaccatgaatatttatgttatgaccaagaatatctaggtatacatgtacttggttggttaagctaacagtgggaagcatgcatggatgcgcaggtgtgaagtcagtgtcgctaagtgaagcagatagagataaagtggtggttacaggatatgggatcgatatagttaggttggttatggcatttaagaagaaatataggcatgccacccttttaagtgtgacagagtaatgaacagagccgatatcgacaccgaaatatatcactgtctttgacgcttccaattccgaggctactctggggaagtatgttggtggaagcggaagtgggttggcttctcagaggttgtatatgtcaagaactataaggattaggcataaaagtgtgtttgtttctctgtagttgaacgccaatccatgattcctgttcagtaatatattatattatactttataaaatgtgaaattacttaacacaggatgatatagaaagcagtctatcatattagtccgtaatccgtatagtaatagctcccatatagggccatacttttccccgtcgcacattcttagcagaagctagaacaaaaggaattaaaaaaaaaaaaaaaaaaaatatatgcttaaatggacattcatcagttatcacgccgagttactgtctgcactctgcactctgcacctactataaattaatgatttagcttcagagaattcatataattaattttctacaaaattctattttgatagctcaaaatccgttgtggtgttaacctgaaataatagtaatgtcttggtgggtaactggtcatggtcactaacaatacaaggatattccgttttgtataaaaagaaaatagcaatggatattccgcatatgctttagtggcctttgagcgaacatatatatgaagattctgattaagacatggttttgggatgtaactcatgtaaggctcaccacaataaaattatgtatgtatacttttgaaatcttagttgataccacgtcaatgatcaacctctgacaagtccttttctgcttttaacagtcaaaaggcattccaattagtgcagctgacacgacacaattaaggaagtaaaagaaaacagtatcagaaagttaattcagcaaaagcgcgttctggaaaacaaactagtagatgaagataaaataaaaactccacccacaacatattctggtatggaagggcttcaacaccctccacccaagtctctatctacaaataaaaacaataaaatatcaaaattaaaatcatatggtatatatatcctctaatattctctttttcatttctcacaaaaaaaatcataccactgttttgcacactggtatttactattagctatatctcctaattaataaagtagaaaactagaaaataataaaaaaccacataattctatcatgtttgttggttcttcatcatcggtttgttatgcattgtctggctactagaataccagctggaggactagtcatctctatctggcatgtgctatacagagagtaagataaatggataagaccaatattaaacctcaccttaaatgttccccttgcattgtaattgaccctgttattctccacttgcctttgaagttttacaccaacatcttgcggcaaaaacaccaagcttgatatcaagttcactgattgcaacctggtttcccttggcctttgagtgaaaggcttgattgtttgtgaagacacgagtctgtctgagtagaaaagctcaacgttcaaggactcaaacctcaccccaattctcctgttaggattggaaaaatttgcaaggagagtgaattcaccattgaggtactgtggtgagtcaaagtacaccacattgaggattgcattgggaatgtcaaacgtggggtttcgcggtttcatggacaggtagataatcagtgttgcaattccaaagaagataagcactaggctgaatatgaagcacagtattgcagcacaccatataattggttttgtcctttgaagtcgaggttgcccgaaaattgctctagtgttggcaagggaatttggtgcttctgatagctgagaatgttgattccttggttgtattggtgtgccaagttcttcttcaacagaggctagcatgcttgaaaaggtgcactactaaaataggccaatggaagtgaatgagggagagatagaagtgatatgtttatttattctaaatggggtgatggatcaatataagtgaagagggaaaaaaagcttttgtagttgagtaataataatggaggggacaatgtgtttttttttttgtattatcaaaaggtgacacaggtgagctaaagttgcaccacattgatgttttaatttttaatgtttatgctttttggtatatatgggcaacgtttgggaaggtgctaaaagaatgacttcaatagagctccctcactttgttgatttcttatcctttaagttttgaatggttttagactttgtcaaatgtgaatgtaaatgagaatagtcagtttgattaagggcttagattatgcgtgtataccaattataccatggtttaactagtgctctttcttctattctatttgaccaagagaaggtccttaaaagcaagttgctgcctggattatataatgttaataggggaaaatgataacttgaagcacctaaaaccaaaagctaaatattaaaattgattatatgcaagttgattttttttctcaaatcatgttaagactttgggatgagaaattataatgtactatataactgtgttatgtactgaaaaccagagataataaatgatgtaaaaattagaaaggcgtgagacaagtagaagagcttacaaatctataataagtatttaatttttttataggctaataagaagtatttcatggagaaaatttcttccttctatgggtgacgttcattctctatatcttgtgtttgctcgtgggaataaatttttctttcaaaagttgtccattttttttaaaatttatatttgcaaaattatatttacggaatatctacagtagtgtattggatacacaaattaccatgaaaaaaaaaaacaatcttctccctccacaaatgatcgtctcttcctagacttccccatttcctagaaagctagaaccgaccaaatcgccgcctactcgattcatcaaaaccacatttggaccagattcggttgggaatgtcaatttcatacttgtaattaactactaattattattttcttattagtagaaaatagaaatcaaagacaaataagtattaaaagtttacaacaatttacattctattttgctgagttaaactatttgacaattaatgaatttaagtgtataattctaagatgcaagaaattgacaaatgaagtgttctgactaatggtaagtgtgtcaccttaatttttaagagatgcgattttgagaattataaaaaaaaaattcattcacaataggtacttgtttaagaagtcttaaaaagttataattactattactcctgttatttttacactatagtttgttttttttttataaataaacaaaaagaggtagtattatacacataagttattgagatgagaaaaacttttcaacttacaagagaaaacacnnnnnnnnnnnnnnnnnnnnnnnnnnnnnnnnnnnnnnnnnnnnnnnnnnnnnnnnnnnnnnnnnnnnnnnnnnnnnnnnnnnnnnnnnnnnnnnnnnnnnnnnnnnnnnnnnnnnnnnnnnnnnnnnnnnnnnnnnnnnnnnnnnnnnnnnnnnnnnnnnnnnnnnnnnnnnnnnnnnnnnnnnnnnnnnnnnnnnnnnnnnnnnnnnnnnnnnnnnnnnnnnnnnnnnnnnnnnnnnnnnnnnnnnnnnnnnnnnnnnnnnnnnnnnnnnnnnnnnnnnnnnnnnnnnnnnnnnnnnnnnnnnnnnnnnnnnnnnnnnnnnnnnnnnnnnnnnnnnnnnnnnnnnnnnnnnnnnnnnnnnnnnnnnnnnnnnnnnnnnnnnnnnnnnnnnnnnnnnnnnnnnnnnnnnnnnnnnnnnnnnnnnnnnnnnnnnnnnnnnnnnnnnnnnnnnnnnnnnnnnnnnnnnnnnnnnnnnnnnnnnnnnnnnnnnnnnnnnnnnnnnnnnnnnnnnnnnnnnnnnnnnnnnnnnnnnnnnnnnnnnnnnnnnnnnnnnnnnnnnnnnnnnnnnnnnnnnnnnnnnnnnnnnnnnnnnnnnnnnnnnnnnnnnnnnnnnnnnnnnnnnnnnnnnnnnnnnnnnnnnnnnnnnnnnnnnnnnnnnnnnnnnnnnnnnnnnnnnnnnnnnnnnnnnnnnnnnnnnnnnnnnnnnnnnnnnnnnnnnnnnnnnnnnnnnnnnnnnnnnnnnnnnnnnnnnnnnnnnnnnnnnnnnnnnnnnnnnnnnnnnnnnnnnnnnnnnnnnnnnnnnnnnnnnnnnnnnnnnnnntattctagaagtgatttgtaaactcattttcaaaagtactttataaactacttcaggattgcatttttccaagtgatttgatacattgtaaaattcaaattttagaaataatttataagtttttaaaattaaaattttgaaagaaaagttaatagattttagaattaaattgctgaaaataatttaagattaaattgatgaatataatgatattgtccctttacgatttacaattggttagtgcattcgtctgtgcctactccctcaggctcttcatttttcttggcttatccgcataaatactctgcccaatcttcttttctttcatgtcatttttccttctttttttatgattaagtaaatagtgaaatacaagagaataatgatgctgaaatttaattaagtacggtaattaataagtatattattttttaaaaattatatttattgcaatcttaaattaataagtatattaatcttcttccaggggtgccttaatcccttgtttgtcaacaaaaaagaaaaagtatacaaaatttataatattgttattcaacaatgtgttaccacattatttaatgagtttaatgatacattattaaatcaataaaatgatttttcttatcataacatggtaattttctatgttaacattatatctattaaaattaaatttaaagatttattgtctcaataacataattgaagctgtttttcattggatattatcgatcattggtgaatggtgattcattcttcttgttgtgcaattatcgccaaggtctcctgggttactttccattactgttatgcatggaacatgtgatttgaaacctttcgttgaatatacctggaacatgatattatttttgttatagaaataccacacattatagttcaagaaaagatttggattttcattataaattttatgagataaaggaaatgaaaaaaaaaaatctgatattcttatgttttaatagtggataaactcacatcattatcaaaagttttaaattcttatttttcaaaaaaaaaaaaatacataaaaacgtgtgtcctttcccaaaacagttttttttttcccttccagcaacgggtcttgaacctaggcacaggccatccctagatattagtttagttcaattgatttgagttgagttgatttttttatttatatatattttaatacctacagagagaaacagagtgagagtgagggaggaaaggtgaaatcatataacaatactaacatttttggataaagtataagacattcaacacttatcatatgattcaaaggatgaacaacgattgtgcagcatacagagtggaaactacatgtgctcgtcttccacaatccgcaaatccaaccctttcaacattggcgcatggaattggtatttatgtatgtatgttattccattaaatttcaataaactttattctttaattaataattaatgcggatatctaaacgatttatgatttgattgtttaccttttcattcttcacagtgatgcagatgtaagaaaattagtgagtggggagtagttgggagagatgtgctaagtatgattcagaaggcttttgatgatccaaatgtcattgctgaggttaatgaaactcttattactcttattcttaaagtggagcacgtggttaattagtctttgtaatgtctcctataaaataattacagattttggctcattgtttgaggccttttatggaaagattaatctgcccgtattactgcaacttcattcccaatagatagagtactgataatattgtgattgctcaagaaatttttcattctatgagaatgaagaagggagctaaggggtgaatagtcattaaaattgatttggagaaagtctatgaacgcttgaaatgggagtttgggaatgatactttgtatgacattggttgcccggccaagtttattgatattctttggaattgtatttgttcccccaggagtttgatcccatgctaggtattattagataggatgctcctatttttccctatctttatgttttgtgtattgagaggcttttccaattattcaagttaaaccatgttattttttatttatttaaatcatgtttttgtatatccaaaatcttactaaaagaatccaagtccagcttcactcaaacttatccaagctgcattttcccaagcttttcttttggtccatggcacacccttattttcggctattcagatttgggcttaaggattgtaattgattataactcttgggttgttcgccttatcctttccttcctttttctctaggcctttttggccccttgttttcttacgaccagaactaaactacatcaacattaccattaaaattaatgataaatcacatataatttattttaaaatttatgaaaaatcttatttataagaatgtatatatacctttttatctgagttgtagaaaaaattctacattatcagcgataggatagctagtgccagatatacaggaggaaatgcccctcaaaagaaatgaaataaggaagaataaactatttttcttgttctctagaattaattgcatttggtttctctaagcaaaaaannnnnnnnnnnnnnnnnnnnnnnnnnnnnnnnnnnnnnnnnnnnnnnnnnnnnnnnnnnnnnnnnnnnnnnnnnnnnnnnnnnnnnnnnnnnnnnnnnnnnnnnnnnnnnnnnnnnnnnnnnnnnnnnnnnnnnnnnnnnnnnnnnnnnnnnnnnnnnnnnnnnnnnnnnnnnnnnnnnnnnnnnnnnnnnnnnnnnnnnnnnnnnnnnnnnnnnnnnnnnnnnnnnnnnnnnnnnnnnnnnnnnnnnnnnnnnnnnnnnnnnnnnnnnnnnnnnnnnnnnnnnnnnnnnnnnnnnnnnnnnnnnnnnnnnnnnnnnnnnnnnnaaaaagtgataacatccgaacaatatgtcgccgcattggagaggatattctgggggaaaaaaaaacatactagtatcaagcgtagtggttaaaatgattcaaacgattaatcaagcatgtttgattaatcaattatgtcaaacacgcaaatacgaatattaggggacaagtcccgaaggaaagtaggaaatcatcacaagcaacgagtatttcttttttatgatttaaccaaagagtctatacatgtggagcacgactcaaacagagagacataaccacgtaattctttttcccattaattttgaaaatcttcatcctcacataagaagtgcgatgcaatccgaatccttatccatatccatttctctcgaatctcttgctctcactgcgggctaattcattgagattcaatagtatataactatatattgatggtttgatttatttttttttgggtacatattgatggtctgaatttgattatacattcagataaaaatcaaatttatgaactaaatgtaggtcaaatatcggcatttacccctttgatgtatcatcaatttgttagttagacaattagatgtttcaaaaattaggaaacaaaagctatttatttaatgctgtcaaaaaagaaaaagctatttatttaacatttgaatgaacagcaaatgattaacgtgatgacaaaaattggtaaaacaaaatgacttttcaattactatatgttaacataattatttccaaagaaaaataattagaaaagcattgagctttttcctcaaacaattaattgatgaaaaatatttctttttttctaaacatggattctgcaattcgctaattataaaaccaaactcgaatccccgaaaagaaacagaataaatagtgacagcattgtaacaaagacaattgaatattaaatcaaacatgaatcccaagaagcaggtaattacaaatatgaaccctaaagaatactaatttataaaaagaaacaaacaaatccccagaacaattaacaagaacgaaatagaacaagaggatgctgtgaactagaacaatggcggcggtgcataaccgatgaaaggccttcctccgccgccgccgcctgcaccgccgccgcaagaatcgcagaaactaacagtgtctttgatcttgtggaatccatgcttgaacactccgaacccgaataccaacccgatggcgatcaccaccagaaccagacacgtgcaaagcatgcaaactctccccccacaacacatctttccccagagatcgatgaaaaaaccaaagttttaatcttttccttctgggtatctcggatctgggaaattcgggtgctgattctgttcgggaggtggtgggaaaattgtgaaagataatgcggaatttaaaagaaaagggaaatagaaagaagtgtaaaagtggtaaatagaaggaaggggaggcaacattggtgtctctttcaccaattcaagacgttttgatttgacgcttttgttcacttataaggaaagctatctaatccattaaaacaagattccctttaataaaataaaaggaacaaaagaaatttatctttttctcaactttttagatgccccatatcacacaagtaaaaccgataattcattccatgtatttaaaattataagatagtaactagtgtaggaacatatttaaattttcaagacaaaatacatatatttaaaattaacttttgatattcggtttcaattgttatatggatgagggaattatttaacaagcataaaaaaccactaatttaagttaatttgaatagattcatctggagagtgaaaattatttaggcttctgtttgttttttttaattattcgaattcaatatgttaaaaaatgtttgataactattttgtaattgatacaatgtttaaatatatataagtgaggattatttatgaaatcatcaagatttcttcttttaaaaaataacattgttataacaaataaaaaaatgaaaacgtgaacgtgttgttgtcaagtttcatgggaaacgtggaaggtgatgcgttaaaggagagtggtgaagtggttgagtccgttacaacaagaagctttgggaggctacaaatttggtgattggtccatacgctgaagttgaccgttggctggtggcgttaatcctgaaagatactaaccacttacttaatcccccgtatgctatactttaaggccctgttttagtttttttagaatcacttctagattagaaaaataagaaaaaaaaataaaatgaattttttcataaactaaaataagtattttattagttaatttgtagatgtcatctcatcttttagaaaagctacattggtgagcttctacaaattagctaatagagatcttatttttacttatagaaaagttcatctcatctttttgttcttattttcttcttttaaaaatacttctaaataagcttatccaaacaatttctttcattttcaatcatcaattccagtttttataatctagtattaacatcaagaaagtagtgacaaacgtattatttattacttccctttttagttataggattttttcataaatttatttatctatttttatataaaaaaatattttttaaattaattaattatttttccaatcatttatgaaaaacaattaatatttttgctattaaatttgtttaatgcgagttttattcatttatttgaataaaaattcgtttattaagatttgtgtaatatttatttaataaaaagtgcattgaaaatttaacgcacctttcccaaccatcaacataactagtagtattaactaatgcccgtggtttctttttcttgtctaattgcttttggactctaatgccagtagctgaaatcttattatatgggcccataaaatatgggcttgctacgtaaaatgaaaccactgtggtcaaaacaggttaagcctactcttgacccaaaaacatgacccactgagttttccaacaccgaaataaaaaaattcaagcctggtaatattcaatattaacagtttaagctcttgtgattagtagtgtttctctgtgtttttctctcgtttgaactttctcatagttatataaatattgatcatggactattattctctctggattcctcttcctttgagccaaggaactgaggaagggtgcttttacttctgcagcagtttgcttgtgatgttagcaatgatacacccataaaaatggttcatgcgacgaccaacctttgaccaagtatatcagatgctaacatgacagtaatactaataatacttctgaaaaaataaaaaacaaataagaagggaaaaaaaaaaacaattgcaagaaacagttggacaaatcggttcccacataatatgtatagaatagaatacttctaatgaaccaataattattttcaattaattctccgtgttttttttaattactagaaatgtattatttaggctattttaatcgctaataagtcatcttaatcacaaaattaatgaagttttgtgaaaatagttcaaaatcacaagcttcactgatctaaactaacgagataatatattatacgagtaaaatatattatcagtcataaagtgattattattagtatatacattacattgacactatttttctttgtctctgtttttttaataatttatatcatctaacatattcatattttttcaattattttttatttttagatatagtttagacacatgagtgtccaagtgccaacaatttatacaaaatggatccattattttttcttcttctcatatattcgtggtcatttatattttaatggttttgaagtcgacggaaagttttttggtggccgatagacgtatggttgtgaaattgcagcagaaatttctcccaaacgaaatggacaaaatgacctgggagcagcactacataaaaatgagacagaacttacagaatcgtttttttgttttcgtttctacattttaattttttttttcggtgtaaatttgttaatatcagaaaatatattttctcgtttatttttcttctacttggaagctatctaccagcattggtccgtttcccacttacgggtctgatagtagccattcggagcagccaccacagacgacaacgagcgattaccatcaagcgccgccatcaacgacagatcatacagtgctctcgccgacggatccgacagcgtctcgtatgcgtcgtggatcttgatgaagtcccgttcgtccgattccgaccgacgaagcgccgaatcagggtgatacaccttcgcaaggttccggtatgccgactttatctccaacgccgaagcgttctgcttgatccggagcacctcgtagaggctcgccgctcgccgggaatcgatcgccgtcgccgtgaatgcccgaattgagatccttaccggaggccggagagtcctgccggcaccggtgagaggcgtgagatttagggttcccgccattgagatattttctgaggtcttctgcggtgaggggtataatgggaaatgaaaatgttgcgtttgttgttgttgttggttgaatttagctttgttttgtgcagtgagatgagagttgagagaggtttttatatggcggtcaaagatggagaatatcacaagattgagaaaagggtatagtggtcatttaagtggcaccaggtattggtgttggtgcacaataacaacttcgtcttggttttgcaaaacgttctagaagctgccccaccacgtcgtctttttttagtggagaaagttttagaataattgttttttcgcaacgtgttaaggaaaatgagatgtgtgtgggtagggatattcgtggtctggattggattagttttgaaataaaaaattattcaatcgaattttttttgctttgttcatttgatcatttattcggtttaaaattttttttcaaatccgatccaatccaatttttttcaatttgtattggattgattttcgattttttaaaaagtttaaaaataaaacttatgagacttatttttatcaaaataaggagtatctagcagaaaaaacacatttattggacaaaaacaaacactattttctaatttttattggacaaacatgtttattaaacaaaataaggaataatgtatttgatttttgatttttgggctatgatggggaataagcccaagtaggtaaatggtaaggtaatatttataattggatcggtttggattagatcggttttcaccagccaaattgaaaaccaatccaatctagtgaaaatttttgattttttttcgattttcaatttttcgattttttggttcagtcaccgtagtttacatcgatttggatcgattgatgaacactcatatgtgtggatacgacaaaaccagggaaaataaaataaagtgagtcgtggaggtgaaataactataaaaaaggagataaaaattataattaaatttttaataattaaattatgttatgaacgaagttgaagtttgattccgcgtgatagccactgaatctcaggagtcaatttatgttgaataatgatatttaaaattcgtatttgaattcaaaattgtgcaatatttttctttttctgtttaattggcaggtgctttgcgttcatatattgcacctgcaaattatatggcagtccttatgcctttttcatgctatcaccaagaatgtaccgataaaatataatacaaggcatagctaccaatagcacctaaaattggaattaatgtactcatgagtcattatatagattgatccatctaatgtacaacagtgttaaacaatttaaatctttttaatagcatattaaaagttgaacatttaagttgttgagcataaaggggaagaataacactaaactgatcttatattcataaagtagaaaaatgttaatgatattttgtgtaacattttcttctcaatattttctctgtgattaacattttttattaattattatcaattttggtggattcaacatttaaatcaagagaaataatcattaaataataaatagatttcaccaaaattgataattttcaataaatttttgtcaattataaaaaaaatgtaattgtcatttctctcacagtacatatgatgttatctttcagaatagtgatatataaggaaaagtttttggcatcgtaactaatacgagttgagaaaaagccagcatgtttaagtactaaattaattttggcgccagctaaaaaagggaaaaggggatttaaattgataattcactagggatcaagatcactggcagttcaaatggaacaacgggtacatgcagttttgaatccaacagtgaataattttttaacttattgtaatttgatttgtaagggattgatgcagttgaaaattcaactgcagaagttagaagagtgaggtagcccagcacagaaccgggacactctctcaattactgtggtctgtgggcgtcgttgacattattagtctggtaaatcacaatcaacgtgcccatataattcacttttttttttttggtgaatgtgctcttataattcactgatccagtagcttaacgctgataaaatataaaataaaaaaatcaatggcttaacagagaaaaaccgtgtactcaccaaataggtacgtactgtaactatttttgttagaaaaacaaaaaacaaaaaggtgaagggaagttctctttattctaatataaatttggtataagattataagtcatttacattcagtatccacgagtcaaatcttgattcattttggttttgaaattaaattaaattccacaagttgcattgccagcgacgaaatcacatatatcagaagcattaatctagcataatcatgcataaaaaagtcaatgtgggtgtacagattcctattttgagagattaatgttgaagtatgaaggcgaccattcacccaattgtggtatgtggcagctctatctctatttgacaactatttttctcctaactcttgtctcgcgttgtccatgcaacatttcaaactattgtaacaccctcgtcctttactccaacactcatcagatgatacccttgaatagatagcctttgtcctaaaatgtcagcaaatactataagattatattaatttcatctaactgattaattgtctctaactaataagctagtatgcacagatgcgagaacctgttagatgcatgggttgctttgtttcttctttttggtaccggcggatctaggatcctagatcaggggtgtaatttatttaaaaaataaaaattgataattatcattatcatatgtgatagttggattcaaacacgaagataaaaggtataaaatataaagttttaagataaatatttgtattttattaaagtaagagtgtgcatttacttactcttatatgtgaactggtaaggatgttcaaatacataaaattaagagttcaaaatataaaattttgaggtgtaaaatataatatttttttgcattttattaaaataagatagtgtatttacttactcttacatgtgaactggtaaggagatttaaatacataaaattagatggtacaaaatataaaattataggatctaaaatataatattttaagataaatattagttattttattgaaatgaggggatatatctgtccaccctgcattccatatagatccgccggttacacctttgctcttatttgcatattctgttgtaaggtggtgttcttaacttgactgggcactacttgtgttaaagtaagtgttatatattataaatgtgcggttatgtgaggtctttttaaatcatataaatgttcaggctttgggttatataatcacaaaatttaaatatttgaattggtcagtcattgagtgacacattgtaaaattacagtttcaacaccaaaaagtaataagtttttttaaaaaaatatgtaaaattacaataataataataatatggtttaaatactttttaaatttttgtaattaaattttttttgttctactacattgataaaaaatggttttagtcattttaaattatgtttgttttttgtcatttaagtgatttaaataatatttttttattatttaaagcattatttaaattgttttaaggacgaaacataaaaaatataaaattaaaataaattacaaagacaaaaaaataaaaatgctaaattataaggcgatctatcatgggaatttttttttttcctacaatcaataaaaattcaataatttgtacaaatattttaaaaataacattgaaggttagacaactatataatcaatttatattatttatatagtttattgtatacaatatttattaatttttataaatgggttacaatgtaaaaataattaattatttttacaaaatagacatctcatacatcataaggtctcgccaactagtagatgtacattttacgccccataataaaaattaaagataaaaatctacatcaaaatgggatatattataatcttaattatttagacactcccaaactttaatctcaagcaccgccattgttgaaatgtctaacaatcaagacttgaacccaatcctgaattcatgtgaacaacaaatttattagatttaacacactttttttttaattttatttaattataataatgttttttatgtccttgcctgtttttttttgttttcagggatgtttcttgagccttttattttttctgtgaaaaatgatcatttaatcctttctcacttgtcacagtaatttgacatagcgtgcaacccactcttgctagaatttcttctgtaaactaattgaacaaatgctcatagttatcaacgacacaaaaaaaagtgtcactaatttgtgctttgcatgaacatttacagcggtaaaattgtgtttttgtgacttattgatcatgagttcgaatctcaaaataacctttttatatatataagggtaagattgcgtacaatatccgaacattggaacagtaattatacactaaccaatgtgatcatttgatcgctacaagtctgtgcattatattgttgaccaccaaatgtgttaaagtacatatagtgacaatcctgtgcattatatagtggaacaccaaatgtgtaagaattcttaccctaacaatcttgattcaaagacatcaaatttgattttggggccaagattgcctctcgtctttgcattgagatgcctaacgccttctccgacctcgtttccctcataattttctcttataactctttttgtcagactaatgtcatctcgtcaacaaatatccttctcctaatttcctccttctccaactatcatcatatttgttcattcttcaactttcgttgaaatgcttcatcgacattaatcaacattaacattggaaaaacactaggtgttaaaacattgacaggaaaatcacttggtgtgaacgcacaacctataaataaactagtgttaccaaatttctttttataaaaaaaaaaaaaaaacacattaacacaaatgggtcacttgagaggaacgtgaagaaaaacaagtgttaccttataagcatctagaaatgtaggcaattgtggaaaaagggtgtgatattggagatggtgtcctttggttttggaaatcatgatatatgaactccatgacaaaaagttggaacatgaacaaaaataaaaggagaaaagggaaaaaaattgtatcaaggaaattagagacaatgtatatgtgagcgtgtgcagtgtagagtttggaagtgtgattaaataagtgcaagaggtgagtatttgtaatgcgattaattctactttttttgctcatgtgagcgatgatcaaatattgagaatttaccaaatttgtcgttcaacgcttgaaaaggaaaggaaaggcaaaatgaaatttgactcagaattctctcatttttttaacaaagattaatgatcaagtttgacttagaaaacttaaaaagtagtttaacttagaaaagacgcattaaatacaaatcaatatttgattaatttaaggttaaattgtaatttttgttttctataattttgcatttgtgaatttagtctctaaatatatttaatcatcttatttaaaccgttaacacaatactatgtgacaaaagattaaataaaataaaaaataaaagtaagaattaaacacataatcttttatataaagacaaaaaaattaattattaagacacttactttacttagtcaattatataaatattannnnnnnnnnnnnnnnnnnnnnnnnnnnnnnnnnnnnnnnnnnnnnnnnnnnnnnnnnnnnnnnnnnnnnnnnnnnnnnnnnnnnnnnnnnnnnnnnnnnnnnnnnnnnnnnnnnnnnnnnnnnnnnnnnnnnnnnnnnnnnnnnnnnnnnnnnnnnnnnnnnnnnnnnnnnnnnnnnnnnnnnnnnnnnnnnnnnnnnnnnnnnnnnnnnnnnnnnnnnnnnnnnnnnnnnnnnnnnnnnnnnnnnnnnnnnnnnnnnnnnnnnnnnnnnnnnnnnnnnnnnnnnnnnnnnnnnnnnnnnnnnnnnnnnnnnnnnnnnnnnnnnnnnnnnnnnnnnnnnnnnnnnnnnnnnnnnnnnnnnnnnnnnnnnnnnnnnnnnnnnnnnnnnnnnnnnnnnnnnnnnnnnnnnnnnnnnnnnnnnnnnnnnnnnnnnnnnnnnnnnnnnnnnnnnnnnnnnnnnnnnnnnnnnnnnnnnnnnnnnnnnnnnnnnnnnnnnnnnnnnnnnnnnnnnnnnnnnnnnnnnnnnnnnnnnnnnnnnnnnnnnnnnnnnnnnnnnnnnnnnnnnnnnnnnnnnnnnnnnnnnnnnnnnnnnnnnnnnnnnnnnnnnnnnnnnnnnnnnnnnnnnnnnnnnnnnnnnnnnnnnnnnnnnnnnnnnnnnnnnnnnnnnnnnnnnnnnnnnnnnnnnnnnnnnnnnnnnnnnnnnnnnnnnnnnnnnnnnnnnnnnnnnnnnnnnnnnnnnnnnnnnnnnnnnnnnnnnnnnnnnnnnnnnnnnnnnnnnnnnnnnnnnnnnnnnnnnnnnnnnnnnnnnnnnnnnnnnnnnnnnnnnnnnnnnnnnnnnnnnnnnnnnnnnnnnnnnnnnnnnnnnnnnnnnnnnnnnnnnnnnnnnnnnnnnnnnnnnnnnnnnnnnnnnnnnnnnnnnnnnnnnnnnnnnnnnnnnnnnnnnnnnnnnnnnnnnnnnnnnnnnnnnnnnnnnnnnnnnnnnnnnnnnnnnnnnnnnnnnnnnnnnnnnnnnnnnnnnnnnnnnnnnnnnnnnnnnnnnnnnnnnnnnnnnnnnnnnnnnnnnnnnnnnnnnnnnnnnnnnnnnnnnnnnnnnnnnnnnnnnnnnnnnnnnnnnnnnnnnnnnnnnnnnnnnnnnnnnnnnnnnnnnnnnnnnnnnnnnnnnnnnnnnnnnnnnnnnnnnnnnnnnnnnnnnnnnnnnnnnnnnnnnnnnnnnnnnnnnnnnnnnnnnnnnnnnnnnnnnnnnnnnnnnnnnnnnnnnnnnnnnnnnnnnnnnnnnnnnnnnnnnnnnnnnnnnnnnnnnnnnnnnnnnnnnnnnnnnnnnnnnnnnnnnnnnnnnnnnnnnnnnnnnnnnnnntcctttgtatttgaagttttttattggggtgatcactcattatttgaatgtttagataataaatccaactaatttggtatttggtgataacttcttaatgtttattatttatctatattgtgttagtttaagagagagaaaaaagtaaagggaaaatatgaaatttcattaaaaaatataatgggaaaaatatctaattctttatttttaaaaataaaaaacaaagtttaattattaactatagataatataaaataattttttattattttaataataaatttataaaattattattaatataatttataaaataattattataaaaattaagaaattcatcccacattataatcttttattagatgatagtcttttttctaatttttttacacttcttagcgcctagttttttaatctatgcaattaaattttaggaaacaaatgccaagtcagatctgagctgtgaacgagttggaatcttatcatccacgtcactggcatgcatattgttctgagtgatgtcatactactcgtttttgtaaacatgaaccattcttgtattttcattgctcaattatttttagaatttagtcatgtattcacaatataaaatataaaatagtttttatattattaattagaaattattattaatgacttttaaaataatattataaaattaataaatttattatatataatttgtgattaaataatataaactaaaatctactactttacatagtaaattcataatccatttattcttatttttatttgtttaatgaatctaacatgttgcataaaaaaaaaatcaatgtaagatgcaaagacattgaatgaattgaagtgaaatgcatgcacagcagagcctcaagtcaaattgcactataaaatatcagagaaaccgacgccactccatagggttcacgtgtgccttcgtggtagatcattcaccgcctttcacccgattaccggatttttttgtctgatcaaaaacgatttttcttgaaaaaggcgtcacgtggaccccatcttctatatgccacgtaggtcatttcaccactcacgacgcatagatttttcttccactgattgtgatatgctgcttcgcccttgcatcacctccatctacacctcaatggccttatcatatccactcagcgaatcaacgactctcaaatctcacgtttcattattgtggcctccacacacaatttcctgtgcttccacgtgtgctgataaagtttattttctttttcttttcggagaataattaccgtaagtttatttattctttatgtttacttatttattttagtttattcattaaaaaaagatagcactgtattatttatacataaagaagtacgattttaaaaacaaaatatatgtgcctcttaatcaataattggagagataatttatgtcaattactatattttaataattgtataatagtgcaatttgcaatacgaatctataataaataagagacgagtaatgtaataacaaaagattaatcagtgcactatttaaataatgaaaaaagattgtcattgaaacttgaaagatgtgttactgcaatgtccttaagtttttgaatgtctcgagtgatcgcttacctttctgattagccgatcttttaagttttaaccacaaaagacaaaaataaataaatataaagtatgttgtaaataaatgataaatataagatatgtccacatgaatatttgtagcagcaaattttcttaaaagagagagaatttagtctgggagtggctagattgattgcatggtgttgataattcataaattatggatcaataatggcaatatagttcctaacaagttgggcaccctgctgacacagctttacgtgttattatcattatcctgttgctataaatacccttccctctccttcccatgctgcattgactcatttggatttgatttggaacaaacaacagtagagcggttgcagtgctctgtgtgctgcaatttcctttcgagcttgtgtttgattcatcaaatcatcaaagatgactgtaggggcaggaatatctgttgcagatgggaacttgatggtgttggggaacaaagtgctgagccatgtccatgacaaggttcttgttacccctgcatgtggtggtgctttgctcaatggggcattcattggggttcaatcccatcacaagggtagccgcacagtcttcccaattggcaagcttcagtatgtactcttcacttttctcttttcaattcttttcttcttcttcttgttagtgaaaaataaaatctttgtaattttgggtgaatgctgtattttttgttgttgcttgtcacaatcaggaagtgcatgtgcatgtactggattacttttgatgtttcttattatgtgtgttggtgcatagttaataatatttattttaggatactgcaattctgatcctaggatgattttttttttttttttttttttcagggggttgcgatttatgtgtgttttccggttcaagatgtggtggatgacgcagagaatgggcacttgtggacaagaaatccccattgagacgcagttcttgcttgttgaagcacacagtggctctgatattgaaggaggaggagaccaaggtgctgctacctatgcagttttcttaccccttctcgaaggagatttcagagcagttcttcaggggaatgatcaagacgagattgaaatctgtgtggaaagtggtatgtgatcttcagaagaagaaaaaattcattagtttattcgcatatatgtggggattttttttgctgttgtgcaaagtgatgaaatttgtatctgatttcaggttgtcctgctgtggaggaatttgatgggactcatttggtttatattggggttggatccgacccttttgaagtcataacaaattctgtcaagtgagttacaacctttcaataaatttcatctatgttttcccctaatttttagtttataccagtcatcgaaatctataagtaaggctttcgggttgggatcattgacttttagttattaccaaaattgagtttaatcttctgaagtaatatttttgttttaacataactgcacttttggatgtgcagtgttttatgtgtctaaacaagtcaagttactgattttattttaattttttgcaattttttttaggactgttgagaaacacttacagacctttgcacatcgcgagcgaaagaaggtaccatagcttctccctccctaaaatggaaattccatagacagtcttatttctgagcactgcatcttaaagttcactacctctaattttacttcnnnnnnnnnnnnnnnnnnnnnnnnnnnnnnnnnnnnnnnnnnnnnnnnnnnnnnnnnnnnnnnnnnnnnnnnnnnnnnnnnnnnnnnnnnnnnnnnnnnnnnnnnnnnnnnnnnnnnnnnnnnnnnnnnnnnnnnnnnnnnnnnnnnnnnnnnnnnnnnnnnnnnnnnnnnnnnnnnnnnnnnnnnnnnnnnnnnnnnnnnnnnnnnnnnnnnnnnnnnnnnnnnnnnnnnnnnnnnnnnnnnnnnnnnnnnnnnnnnnnnnnnnnnnnnnnnnnnnnnnnnnnnnnnnnnnnnnnnnnnnnnnnnnnnnnnnnnnnnnnnnnnnnnnnnnnnnnnnnnnnnnnnnnnnnnnnnnnnnnnnnnnnnnnnnnnnnnnnnnnnnnnnnnnnnnnnnnnnnnnnnnnnnnnnnnnnnnnnnnnnnnnnnnnnnnnnnnnnnnnnnnnnnnnnnnnnnnnnnnnnnnnnnnnnnnnnnnnnnnnnnnnnnnnnnnnnnnnnnnnnnnnnnnnnnnnnnnnnnnnnnnnnnnnnnnnnnnnnnnnnnnnnnnnnnnnnnnnnnnnnnnncacttatattcagatgccagatatgttgaactggtttggatggtgtacatgggatgctttctacactaatgtcacttcagagaatgtgaagcaaggattgcagaggtggtacttccttccatggacaatggacatagttatgagatataccgcatcacataaatttgtgactgttacatttttatttttatttttgcagctttgagaaaggtggaattcctgctaagtttgttataattgatgatggatggcaatctgttgggatggaccccaatggtgttgaatggaaatctgatagttcagccaagtgggtacttcctttctaagtttcattatcaaattgtaattccatccattttacattgttgaatcagttcatttttgtgctttcttgtccaacagctttgcaaatcgcttaacaaacatcaaagagaatcacaaattccagaaagatggcaaggaaggtcagcgggtagaggacccagctttgggacttcgtcatatgaccaatgaaatcaaactagagcataatataaagtattgccattttcattttattgtttctatttctccataagatattcagttcacacatagtactcatgatcatctttggaaaatcttccccaggcatgtatatgtgtggcatgcaataacaggatattggggaggtgttaaacccggggttccgggcatggagcactacgaatcaaagatggccttccctatctcatctcctggagttgagtcaaatcaaccagatgaagctttgacaacaattgccatcaatgggcttggccttgtgaatcctgagaaagtttttcatttttacgatgaactccactcatatttggcatctgctggtattgatggtgttaaagttgatgttcagaatatccttgaaactcttggagcaggacatggtgggagggtgaaacttgcaaggaaataccaccaggcattggaggcatcaatcgctaggaacttccctgacaatggaatcatttgttgcatgagtcacaacacagatggattatacaggtatggattgcttataaaacttcagtgaatgcttttattaacacaataaaatagattttttttattcatgatgatgattttctttataaatttacttgtgtagcgcaaagcgttcagctgttattagggcatcagatgatttctggccaagagaccctgcatcccacacgattcacattgcatcagtggcttacaatactattttcctaggtgaatttatgcagccagactgggatatgtttcatgtaagttaccaaatacaggatccttccttcttttttcatgaaaaaaaatatgtacttgcttctgcaggagctaattaacttcttgtgcaatatgcagagcctacatccaatggctgaatatcatggtgcagcacgagctgtagggggatgtccaatttatgtcaggtgagtagagcttgtagtaatttttttttcagtactttttttatttgataaatgatgtcttaccattggatgttgttctattgtgcagtgacaagcccggacaccatgactttggtcttttgaagaagcttgcactacctgatggttctatattaagggctaaacttccaggacgaccaacaaaggattgcttatttactgatcctgccagagatggaaagaggtaaagaatccaaaatgatttggctacctatatagttatatacttgaccaattgatgtagtatcttactctttacactctactacaaaatatagtatgcatgcttctttatatttgtattttacttaactccttggatgctgcttttgcagtcttctgaagatttggaacatgaatgatttttctggagttgttgcggtattcaattgccaaggagctgggtggtgcaaagttggcaagaagaaccttatccacgatgagaatccaggcattgtcacaggtgtcattagggctaaagatgttgactatttatccagggtagcagatgataaatggacaggagatgccattatttattcccatcttggtggtatgtttttcggcttgacaatgacacttgtaaagattacaaaatttaacccaaattttcttttgtgtaatgatctttttatgatgtcaatttgcaggagaagtggtttaccttccaaaggatgcatccatcccagttaccttgaaaaccagagaatatgaagttttcacaatagttcccgtgaaggaattgagcaatggtgtcaaatttgctcctattggtttaataaatatgttcaattcaggaggggctgtccaagagtttagttggggatctaatgaaagtacaaatgtagccatgaaagtccgtggttgtggccaatttggtgcttattcatcagctcagcctaagttgataatagttgagtcagaagaggtagaattcaagtatgaggaagaatctggattggtgactattgatttgagagtacctgagaaagagttataccaatggagcatttctattgatttttgaatcagagactttgtctctagatgaaggggtttagagttatagacttgatagtgtatccatagttcgcaacaatatgatgagtgtatgtagaccaatagcaggaaatgttaggttccctgtaaggaataaccagaagcaatgaatgaatatcacgaagttctctacctattttttgtgatatacttgagcagaatgtaaatgcagcctttgcatcgttccccacacagtatgaattggttgctctttagtttcattatgcctcatttctaagaagttcattgtagtttcgttaagctagaaaagaaatatacggatagaaatgcattatgattagcccgcgtatcctttaaatggagaactaattgatttgataaattcaaagattacatgtcttcaatttttttatgctccactgcaaatattactcaaggcgtttctgcaagatggaactcctatgctgatatgctctcattgaaagcagttactgagaaatctacattgacagcaggtccttgttgggttggtctagaactctgaatgaatcctctcaatttaacaagtacttctgaacaaaccgaaggactctgcagcaggagacaaatgttaaacaaagcaccaaatatttcctctatgtaagcctgatttatatgcaagcaagtattgatactaaagattcaatgatagcactcccttggaattccagcttcacataatggtgccatgagtctagagtaaaagtatataaattaaagaatcaaaattactaataaaataggccttaaatatgcttagcaaaccagtttatctccaaactaaattcattaataagtagaacaatccttgcacttttttttttttctgatatagcttgatagaccgcagaaaaagatgaaagagctttttgtctccattcttgcacctgtgaaagaaaacagaagtccagtaccaagattaagagagcaaatgcaaggcaaaggcatgtttttggccttttgagcaccaccaaatagaccaccaaatgagttcatttttttctttttgtgacatgagatccctactacacaatgccaaagtgattcaatagaattatgctaattacactactaaaaacttaacttgcattccaaaattcaagtgcagaggttttgacttccaagtctaaaatgactctcaaactgacagaattagccttattttatctctgacaaaattgtagatcttttccttatctttacaaggactactcatatgtgccatttgaagttctgtaaagctctctaggtcatgcacaagaaagataagtcaagtgagtataaaatctaaaaataagcaacaattagtaattaaaccctcttgtttacccaagacaaaaactgaattagaatgaaaaaataaaaatccaacagaagtcaaataagttaagaaaaatagaaaaatattaaactaaaaatattcaatcaatccctactacacaatgccaaagtgatttactagaaatgtcatcaatcacattttaaacattttcaagtgcactaatgccgagcaatagcctaggcgtttccttgttgttgggctttttgctaatcctttacaccaaaaaaaattgatgcaaattctccaaaatctaacccaaaaaattcattaataagctccttcagaatataaatgataatcttttaagaagtctgcgataaacttagataaatttatggtactaaattgaaatcggtgctgctattatgatatcaagtaatgaaatgaacagcatgtttggaagctgaaaatcaaataccaatcaagcgcttcctgaccaaagttctaaaaccaagaacactgtaatattttttaagaaaaaagtgaaaagaaggcaacagccccagcccacaggccacagccagcttgtgttttatttatataattatgggtaaatagttaaattgatttccaacaaattagttcttcaaaaaattgtaaattttatatttgaatatacaaaaaatgtgataaactaatcctgtaattaaatatttaaatttataaaattattttattattaaattctaatgtttaagaatcaatttgataatattatatttttcgatcatcaatttgatgatattatattttttgacaaccaatttgagctgtaaagtttaaagataaatttgtcaatttgcataataaatttatcacatgttttacatatttgaaaattacattaattttttatctttcaaatattaatttctgagcgtcttaccgagttgtgtcttcaaggatgaatttgccttattaatctttaattattttttgagaaattatatttaaataaatttgtacaacaatgaaagaaaaaggtgtaaaaattatatgaataatatttgaggatagagaaggctataacatttgagtttcacatggttaggcctacaaaacgacacgtcggtggtgggaataagcgttttagtagttgagtttgggtttggccaaacaaaaccttggttaaaccctgaactcaaagttgcattgcaatttgcaggagagaaacagaaatgtttggtaggggaacggtgtggtcagtgttgaagcgcggcaaagaagcatgcagaattcacaagctaagccttagaggaacgcctttctcttcttcttcaacccaaccaccacctttcaagttcttaacccctcccgtcgccacccattacattcatgctttccgatcccaactaatccccaaggttacctcactttctcatctgggtacacttcaattttcaatttttatcccttttaaacttgtatgatcttatgggtcatcatctgttcctttactttttatattcacaatcactcctaattctttaatctctatgtcattcttagaaatacccactattcttcctttttaattcctccatgatgatgctattatgtgtgaatgattagttactagttactactacatctagttagttctgaggaaattgtgttgggatgatgctttttatttagggtcatcatgttcatgtgccacaaatgaggaacttttctaagatggtgtctgctgaacaaaaagagggattgaagctgctagtgagtgggggttcgcgtgctcagaaattggttggagtatggctctttgggtcagcggcatgggtgttcagcatggtggtgcttgggggtttaaccagactcactcgatctggtctttcaatgaccgattggaaattcaccggcactctccctcctttctcagatgacgaatggttgcaagagtttgacaaatataagcagtcacctgagtacaagcggtaaactgaaaacacttgctacacctttttaatttcccattaacttaggaaatgcaccaagggactttttatttttatttttctgcgagaaaagatactcattccttaacacatgtaaataagtcttcttgaagttggctgactaattgttaatgattgaaatcaaatcataataagcagatgattaaaaattaaggaataatgttttaaacaactgttctcaaactttgtcataaaattaacacggttaatagtttaaacttttttgctgcaagaaaaattgacatgattgtgtgtttcagagtatggggatgataattaatatgacagtgatggagaataattgaaagaataggtcaatttttagtgctgattatgtatttattgcaagaaaaacaagggaagggattagttaagtggaagtgagttgacacttggtctcaaagagcctagtagttcttatgaatgtcatgatgataattagttttgtgcttgtggcagtgttaacagaggcatgaagattgaagaattcaaattcatctattggatggaatatgcacatcgtatgtggggaagggcactaggagttatgtttgctttgccatattcatattttcttcataagcggtatattacgttgagattaggactgagactctctgctctgtttgccctgggtgctggacagggtcttattggttggtggatggtcaaaagtggtttagaggttggaacataaataatataaattcctctctttatttgaagttaaattgactggccctgtcagattctaataacattttatttctttaggagccaccatctgaatattctcagccaagggtaagcccttatcgtcttgcagctcatcttacatcagcatttgctatttactgtggcctcttttggactgcactttctgttgttatgcctgaaccaccagctgaatcgctaacatgggttcgtggggcagctaaagtgaggagacttgcattgcctatcagcgtacttgttggtcttactgctgtctcaggtgcatttgttgctggaaatgatgctgtatgttctcttattaaatagtttcttgcctttcacatttatacttgaaatgataattgagcctttggtgaggataaagatgatcattctgctcacgtgttaattcccaggggcatgcttttaatactttcccaaagatgggtgatacatggataccggaagacatttttgaaatgaagcctctgattcgaaatttctttgagaatacatcaactgtacaggtaatccatgctgatatctctgaaaagcttaaatagtaataatacctttgttttcttgatttttttttttggatgatttttattatcttttcaagaattgagaaatttgaactgaatgaaatgttttgaaacactttgtgagccattattgctggattggttagtagtaaatttatcctcaaaagtatggtttggcggccaaagttttaacaacatgaagttctaattggtgtttcgcattgctcttaacagcttgatcaccgtatacttgcaactgcaactctgatttctgtgggcattttatggtggtcaacaagaaagctggagatacatcctgcagtacgatctgtgattggaggtgctgttggcatggcagctcttcaggtcttaatttcaatttccagttttatatactttataataattatcattttgtattgttgtttctagctagctctctgcctgtcgatatattgcctcctttgttgaactgaatactcagacctgttactccacgtgtttttgtctgattcttcaactaattgaagatgatgatgataaatagataaaatagaaataggaagaaagactttatggtgttcgtttttgttagtagtctagtatatgatttcccagaggctgttgtcatcaagtatataatgtaattaattttgcatggtttcaggtcaccttaggaatttcaacgcttctttcatatgtacctgtttcactgggcactgcacatcaggctggagccttgacacttctgacatttatgttacttcttaatcacacagttcgaagaccctctttgccccttctcaaatctctgcctcaagttgtcaaagcacactaattgtttcccggtattatattgcatcaaggattaggctttttaagttgataaaatctgtgactattattttttccatgctaaattttgtgttgagctccttgtccaatcttccactgttggaatcttctgtatttgttttgtacatttgaagcatgaaaattcatgatgatgcaaccgatctgttgattatgtaattaacagatacatattattaaaaagtatacctgtgattggaggaagagaataatttttttgtaatttaactgatccgttaaattattgtttgtctagaaacccgaaaccaacgaataatatgatatccaaggtttttccagggtggaggctacctcaaatgaatattttgaaaatgaagcgctaaacacttgagttggtttattcagaattataactaaccaaattcaagctcgcaacatagttcaataccacaatatctttacaccattatcactatatagaaatcttaaaaaagctttggaagcaattttttattttttattttttttatcacaaatccaacatcttattcagcacaactttatgctactgggagtctaaattggccttaaaataccataccatgaagcaacattaaaatcacagaacatttaagaactttcgtctaagcctttaacagttttactattatatattattattatatagcataatatacatgcatttttctttcaatgttgtttttaatgaaattgtgttatcaattaataaaattactagcatagttgagtttaggaaaagagactatctctactgctcatatattcagtatttgagagtatctcaaacaagattatatgtgaagaaggatacatgtggcgaacaaaaaagagttaataaaatttatttacatatattgcttttaaatcttaatttaaattttaatcacagataaattgatttcatgtaatttatatactttttaagaaaaataagttggttatacttttatatttatagttaagtcaatcatctattacatgtaaataaggacatagttatttaatttttaaaatataaatagtttttttttaatatatcagtaataatctagaactaaatttaatattttattttattttgcgagtattagtgagttatatcgtggaataaaagggcactacgacgtaggtggtttatgatttttcgcgtaaaaaggctgtttccactttctataacagatcaacgctaaattcatattatcttattacgtggtagtatgaaaaaaggttcaagctatcgaaagaaaaaaatgaaaaaagattcatgaacactagaaaggtcagaaacatgggttaggtgtctcgtggatcttcgaatgaagtttatttgagaggcttgctggcgtctatatataaatatgttatgccttcgaaaaatgcatactcatatacacccttttaattattttcattataattcttgggccctgagtgtgtgatttttgagaagcaaatcgatcaagcttgtgaagggatacaaaaatgagtgaggaagaaacagatgattctccattgattcaaggttttccttcccttgacgtgccatttaggagaaccggtaagtggttattacatctgtttttaatcatttataatatgaaagctttatttatttctcccatcagaatgcttttgtatatgtaaaaggaattacttttcttcttcctccttggaatttctgccattaattttctctgcagccagatggtattgaatttgaatagcagtagtgagatatttgttggactgactggtgtgtgaatggcagttgttagcacctttgtcttttcgaatgagtgtggtgtttgttgagaaatttaagtaacaagtattatttaaaaaatgtataattaattaaacatatttaataaaactgataaaaaaaacttctcaaacttttaatgaaggagtttatatcaatattcttaattaccatgttacatttttttaatcataaattttatgtccaagtgatgaaagttaaagatgaatatagtaattgacattaattatatatatatatatatatatatatatatcatgcttaccattcaaatattcaaaagaaagaaaggtaattaaaattctaactgtatattattctttatacatgtgacatgaattagtttatttccacttttatgattaataggaaatattatgatatgataaattaggagacacgaggcaaaaggtgtgtggagtggtggtgcatgcgggcttatatggtgccaccacgacctatgtcattacatctgccaccagcatcaggtaaccccatgcatgtgtttttaatttggtatagctttattttctgttctacttatatctaatggtgagttaggatgagtgtaatatacatatttgggtttggatacctttgatttctcttgaattaccataaaacaccagagtttatcaacttcatatagctaaaataatgtcaaagtttgacaaaatgcctgcaacattaaaaaataaaatttattatgtgatataaactttagagtttagatgcatatagtagacatttatttagtcattttttatttgtatttatttatttataaatgaagattaatatagataaggaaattatgggggaaatataacctggtgcattaatttggtagtttctttttcaaatagaaaagttgagaaataatagaaaaaatgtatctgttaatcaaatcaacgttgaaacgtgaaaataagaaatggtaagcatttataaaattgatttaatttgaataaaaatgattttaaaattggttttgattgtaattgattgtgaagtaaagttatttctttatgtttaaaaatctttactctaaaagcaaattagtactaaaattcagtatttttctttatctaacgcaaaactacctaaattgttttaactcagtaaattataaacttataatcaattcttcaacaccggactgaacattagaaaatttgcctataatcacgttaactaatatttaaagtgattttacattactcaacattaaacagagcacacacttggtaaatcctcttgtgcttgttttcctttttcttttattttttcagtcaaaatattttttgggtcaattcttatatttgtttttcgaaaaatcttcggacatggctctaactgtacgtttgcttttgctaagttaccgttaacgggctgggctagccataatacttgctcggcctagcccaatttgcaagtttacatgtagactgttgttcggaatttgaatcatgcacttccattagtgtatcttacatcctcctatttttgtttgaaaatatcaaattacccttctccaaccctaacacttccctctttgtgtgaactactcccgtgatgacaacttcttctcccacaacttcaccttcttcacagcagctttgtgatctcctcctcacaagtcacaatgtcgcacaacgtccttccctttcctccttccattgcacatcgtcattaaagataagaatgtaatccgtgttttgtcttctggaatgaccattttagaatattttttattttcaactattattccaaagacacaatttcgaaagttatataatagccttatagaatgataattctgaaacacagattgagttctagaataagattttcaaaatacataaaatattttttattttcaaccattatttttgactattattttttgactattatgtaacaggtctgaagttattttttattgttatgaaacacctattttaaaaattattttttacgattatgaaatacctattctacaagccataactacttttaattgttataaaatacctattctaaaaaggtttaatatgaaaagggtagtttgtgatttttaaaaatttgggagatacatgattcaagatgggaggtagaaaattcaaatctcttgttattcacttataactaaactgggccttattgtagtaagtaataaccactgacaacaccagaaccaaaagattaaaaaaaaaacttaaatcattctataatctttttttgtacaattgaacgcaacacgcatactaggggttgaatttggggagcgtttgatttctaatttctaaaatatatttttggttttcaaaaaataattaaaaaaaaattggtagagtaaaggatagtggaagtctggaagacacaatgagtaattgaggaaaaattaaacaagataaaaatcgaagattagaattaattatatttttggtcaatcaaatttcaattatgcaaattgaatcttatgaagtaccgtaattattttttatccacaaggtccgaacccgaaattttacttaaagaaatcgagtctaaaatcactcggaccaataacttgttgataactaaaagttttattaagtattttaaaacaatttttaaaatgtaatagattttaaatgaaaatttaatatatgaataatgtgaaattgttttgaaaaaactttttaactgtgaacttgttttgcaaaacatttttaaaatcaaaaagtgaaaacatacatgcccttaatatgacatccttgcattttcccaccagatggcacttctactactaaatcaacagagtatcagaaccaaattgcaacttttgaaactaggggcttcaacagacgttatttttttgaaggagagtatatatgtcattttgaacagacgttattcctattgagttaaaagacacaggtccaacctgctacataggctacagtttatgagaaattctggttcagcgaggtagacattttggcataaaatacgtatatttatttgataattaataggtggtccatctgagtgtgagaggcaaccgcaaaatatatttacctagagatttccaagcatttaacctaaccagttattttaacaggaattcatatctactttcctttagcacattgctaatccagtggtggggtgccataagtgctggtggaattttggtgcagcatttattggcaattggtgaagggcataatttattagctgggtaaaaatgtatgacattggttttttgctgtggcaattttggctggacttcatttatgttctgtgtgcgggcgtcaataaggtgtaacctttgtgggtgctgcacaaaaaagactatatactttatctttgcatatgggaagttcacaaagtcccataaaattagcacaatccttgcttacgataaggatgagccaaatgatattccaatcaattaaagtagcaaaagacattactcaactgaataaagatggtgcttttacgcaaaatgattctacatatttttcaatggaatcacaaattttctcttcgttccttgagcttgaagtgaaagaagctaaacggtagtgggccttagcccttaggtgtgataaggaagggttgaaccatgttgccagtatacattcattttacgcaacctattctagtcctacatattcttcatgaaatccaatattttccatacgctccttggagtgaaagaagctacacgtaatgggctataggtatgataagcaagtgttgaaaataggagcataaaacactctgatcttccacgtttggcgtgctttcaacttcaaggacaaaaccaatataatttcaaatattcattcacttagtttgttgaagactgtcaaataatagagtccttctcgtacgggagaggcatagtgaaaaaagcgaaaattgacaaactcttatctctctctttttgaggggggtgggtgtgagaaattattagatggataaaaactattatcatttcattaattaatctccacgtgacatgtatgtaaaaaaatattattaattacttttcataaattgaaaattttgaatacgtgacgcttaaaaattagaggagactatgaatatgtggtggtcttaaacaatctaataatatgtagtagggtggggtatgaagtattgtgatgtatataaagtttgtacacaaactaccagaaagagatgaatgatgttggagtatttggtgtgttgactaaggtgagcaatacccaacatgatgttaaacataatatgtaagttttctaaattatctattttgttcattttcaaatattctgaatcttcctacattaaccccactatttcactcacgtacctctggtcatctgatagatactgattactgaatcattttcacaatgttgagcattgagagaatatattccacaagaacacgacagctccattattagaaagttatgatgacgagtacatatctttattaaaaggctaccacagtcatacaccatgcagcttcaaacttcaaagaatctctttcctcttcacatcatgttctggcctgtattttttataatgaaatttagtacaataaagttttcctgattttatgctgtgtcctgtcgctagtaatgtctgttttaggacacaccttagttatcaagaacatggcttccaaaaattttaagatgctattttaattttggtttggcacagacacacatgtttatcagcatagtttagatttatttacactatttcctgcaacttcttctatgctgctaatcaattacttaactttaggagagttgtcctagacatcaaagaagagtcctttatcaattttgaaaattcatataaaatgacatctccctttttaatttcataagcatgtgacatgcagaccaaaattatgtagttaccaaacaaacataattttgaattcaagtagctgccatatagttcctttgattgtagttggctgtagactgtatagggaattcaattacactgaactccatgaatgccaattgagttggatgcttggataaaaatggctgttcaaaactctctccaaataactagaagtggtagtggtggttatgacgatgatgggcgtgctaaaaggaccggtaaaaatctctaggaccattccatattcatatgtatgaatttgactcctgaattttagtccttccatcaattttaccaggaactttatggagtgctgtggctcatatcatcacagccattattggtgctggtgttctgtctttagcttggagtacttcccaattgggatggattgcaggaccagtttgcttgcttttttgtgcaattgtcacctatgtttcttcattcctcctttccgattgttacagaactctggatcctgtaactgggaaaagaaactactcttacatggatgctgttagagtctatcttggtagttccttgttcttgtacaagcactctagtctcaaattcaggatatggttccagtgaaatgctaccatattttatgccacctaattattttttctgttagtttaggcaataaaaggacatggttggctggttcccttcaatatttgagcttgtatggggttagtactgcttatgtaattaccacagcaacctgtttgaggtacaattcccgttaaatcccatgtaaaatgaaaagatcattgtttatatgcaattttgaatttgtgttgtagtttgttacttgtatcatctgttgctttttattttttatttttatctcatgtaatattagaggtactagtctaccttaatgatatttgtgttcatgttcaaacgatgcttggtctttctacaaaatgcagagcgatattgaaatcaaattgttatcacaaggaagggcatcaggctccttgtaaatatggggatgcagtatatatgatgctgtttggactagttcaggtcataatgtcatttataccagatctccacaacatggcatgggtttcaattgttgcggctataatgtcctttacatactcatctattgggcttggacttggaatcacaacagtcataggtaaggttcattttcacaattagaatttaatgttttgtttacttgtccattcaagccttctgatcattgaagaaacaagatgaaggaaaaaaaaaaaacaagtactattattctaaaacacaaatgtagctgctaaaaacatattaaatgccaaaatatatggaatgtggaatttatgtatgaagaaaaaaactatattatgatattttcttagaatcaaggagtggaaagagaacaatggatcatgagacttttggttgcttttgcagaaaatggaagaattatgggtagtttaacaggagtaccggcttcaaatattgctgacaagttatggttagtcttccaagcaattggtgatattgcctttgcctatccatacacagtcatcctccttgagatacaggtacccttcatattccaattgggtgggagaggaacgtgtaaaggagaatttaatttaaatgcactcacaagtaaactgtaaagatattttatattgtgattcaataacaaattgttatttatagtaagtttgtttacgttataatagctattttaaaagttgtatttaacatgattttttatcagttgacggtgcatttttttnnnnnnnnnnnnnnnnnnnnnnnnnnnnnnnnnnnnnnnnnnnnnnnnnnnnnnnnnnnnnnnnnnnnnnnnnnnnnnnnnnnnnnnnnnnnnnnnnnnnnnnnnnnnnnnnnnnnnnnnnnnnnnnnnnnnnnnnnnnnnnnnnnnnnnnnnnnnnnnnnnnnnnnnnnnnnnnnnnnnnnnnnnnnnnnnnnnnnnnnnnnnnnnnnnnnnnnnnnnnnnnnnnnnnnnnnnnnnnnnnnnnnnnnnntttttttactgaaggacactctagagtctcctccaccagaaaacaagaccatgaaaaaggcctccatgattgctatcctcattacaacattcttctacctctgttgcggatgctttggatatgcagcttttggaaatcaaacaccagggaacctcttgacagggtttggattttacgagccttactggctcattgactttgcgaatgcttgcattgttcttcacttggttggaggatatcaggtactagtgctactgatcaaagttctcattttatacttaagactgtaacttcttattaatcaattgaactactacattctttcttaatgtaaaattaatagaaatgatggtattcataccgaaagcacaattgtaacaggtaaagttaccataaggaagaaattaaaacaactaatacaagagaagttctaaattaatacattagtaggaaaggtttggctggaaatagttagcttcctaacttagcttatgaaatgctccaatgacatttattagaaaaataaaataataaatattaagctatatgaattcttgtccatatgcaacaatatctgaattcttttcatgttaccagacaaatcatagttgtgattcttgtttatgatcttttgatcagatttactgtcagccgatatatggtgctgttgacagatggtgttcaaaaagataccccaacagtggatttgtgaataatttctaccaattgaaactgcctcggttgccagcttttcagctaaacatgttcaggatatgttttagaacagcctatgtggtttccacgactggacttgctatcctatttccttacttcaatcaagttataggagtgttaggagccttaggcttttggccattggctatatatttcccggtagagatgtactttgtgcagaggaaaattgaagcttggtctagaaaatggattgtccttaggaccttcagctttatttgctttctggtgtcattagtgggtctcattggatcatttgaaggaataataagtgagaaactaagataatgaagggtgcttcatttgtttgagtttattgtctagttgccatatcttccatataattcagtttcacattaattctattactatttactattgagagttaacaaaggggataccaattatgtggggatgtctcaaagtggtggtggtgtggacgtggaatagttctgtttggtgaaaaactccctttaaagaaagtgtaatgctacacaaacaactctctatacacaaacttgaattgatactggattattagatttagctcaaaatttgtgcaatgtcacattaaactttgttttacattgacataatataaagtcataccaaataactagtgtcctaatgtattggttaagaaattaataaatatttttttattaaaaaaacatgttgaaaggcatcaaaaatcactattgaaatgcattaataaggttatacagaaagatgaatgtcaaaatgtcagatgcaaatgcacagtttaggaatgaaaggccctcgttatcttaatcattcatatattactttatcattaagattaacaaaagagtgcccacacgagcgtactataaccaaaaagagaaaagaaagaaagaaccaatggaagcttttcaaaataaagaaaaaacacaaccctcggcaatagagagttctaaaacaatctacattcttcacgaattattggtcggtataaaatcaattggccatctttactaaatgctttatatccaaaacaaaagttcagttgtagtaacattagaattcattaagtagtactaaagctgagcatgactatgatttaaccaggaagccaagagtttcaaaagcacaaaatcaaattataaaataacttgttcaagccacaaggaaatcaatatcgagctagtagagatagtaaattgacaacttgagtgaaaatatcttccatgacagcatagttagtttaaggaaaaaacttaaacatagctagaaacatcagtatatgggcaagtttaatgctgctgcgatcctgatgttgaggttccagattcagctggggcatgtgcagcctgtccagaccctgtttgtgaagaccctggctgcatagaatgctgataagcatgatttgcagctggtggctgggatggagccactgcagcattgtatggagatgggtactgttgataagggggaactggtggcatataaccatatggaggataatactgatgatgatattggccaggtggaggtggcatcattggatgggtataattttgcatttgctgcttctccaaactagccttgttctcccctgacccagaagtcccaccaggaggaccatcttgagatgcaacaagagcacccattctttgaggatccatagatgggtagtagcttctttcctgctgaagaggtggtggtcctggtggattgttatagtaaaccattccttgtatttggtcctggttctgctgctgtgatatcactgcccgaggcaacaatccactatgagccacagaagcctgctgccttgcttgatcagagccatctgactcaggtttcgatgtctgaggcctgccccacatcagctttagccttaggcccttaatgaccagtttgttggagagttcttctgcggccttttctgcaccttctctggttgtatatgttacaaaagcacaagcccgttggagaaccattttgatggattcgatttctccgtgcgcatagaagtgatcccgcaaatcctgctcagtgaccctagcatcaagtccaccaacatagagagttttaatgttctcatcttcaggagcctccagagtgttcatttcccccgccttaccaagtagcttcaaggccactggatcattcaccctgaacgttttaaagcatgaacagcaaactaatgaagtcaaaaccatgaagcaaaattaaaaacaccaccaactactgcaactagaaatatcatcagtatctgtagtcacaaggatttcatgcagagaaaactaagaataagtagaggatacgttaatatgagattgaaaaggaatgatctttatacacatatagcactaaaatatagaaccaaaaggttatcctcacaataagatatttgatggctgttgactgtcagctacatcatttttggccacgatggaaaattaaaggtaacatattataaaggaatcaaccttcatccatgtcaaaaattctcttactacatatttgcaagtagcaaagtacaaagaaaacattcttaaaagtacgaaaaattacagtctaaggacaatgcaaggaagataagccactccacttcactaaatactgagaacaatacaatacatgacttcagtttaaccacatatagaaggaaaaaaaagaacgccaaaattgcaagtaaatggcagttattagccactttttattaatataatgacactgagcccttattgtagcccgtgctactgaatcagctgctttttttttgtaccaacaattaagaaaacttagtaagcaataaaattttgccactttggatccccaaatgttaatgtcaaatagtggttttgacttgtatatctgaccccacttggtggaacaaggcttgattattgttgtttaaaacaaagcttcctacaagcagaactatcacatgactttgctggaaacaaaaacctgcaagcttattatcttagctacacaatagttcgtcacacagaacaaccacaaaagaactaagtgagtgcctaataaaccaacaactatatccatcacagagataaaaaaatgcttgagttgctgcccagtgccaaatgccaatacatttaaaaactaaaaaagagcaattgaaagagagatcgagtaagaaaagtcaaaagcaaataaggaagtcatttttaaccatacatacccataataacgatctttaatattttgttgagacaattccccagtctctggcatctcatgtctataagggcactcagctcctctggtacactcacccctaatgtagaaactgcaaatatgtgcccggtttcttttgtagtatggtgttgttctttgaagcttcatgatagtatcatttgggcgtactttaccataagaggattcataatctataccagctctagcctgcaccatgcttttattcttagtaaaaagatcacgatcaagtaatgaccaaagagaactgagtcaaaatagtatagtcttatagattcttaaaaaaatggataaagaaaatttgaaattttaatagctgttgtcaattgagaatgtgaaaatcagagttccagggttgagaaattcttcatgtaaaaaaaaaaaaaaaactccaaaatattacaaaaaccatgcaagccacaaaaataacaattcactcatgactacatacagaatgactttaaacccataactagttttccaatcattaattatgttcagctatcatcaactataaacatgacttagcataagaaaaacataccctacggtcatgctcttcagcaaaatactcccgattaacatcgctctttggaatggcatcatgggaatcaatactgagagctgtgtctcggacttgaactggtagtccatactcaagatccagaaggcacacttgacagacatttttcaatttactacatgtctgacagatctcagttttcttatatcttgcatctcgaccaggtctccatctaaaaacagtgaatggccgtgtacaaatcttgcactccttgtcatactctgctcttgtctgcaccgaaagataagcataatgaaaagcaattgaacaaacaattggattcccacaatctcatctttaatggaagatgctgaaatctgaaaattattaactaagcacattcacggactccctcgactccatagtttttcatagtacaccagtaaatcaactataccattttaaatttcaacattaactactctgtgataaaaaaaaaacttactgttccatacttcaaagatgaaaaaaattgaaataattaagctctttcatttgaaaagccctagaagaattaagctaagatgctccaggaatccaagttcagacatttgaaaacaaaaccattggcctgcctgaataacataaaaggttttaaacttagcagttgccatctagaaatttctcattctcaggataaaaatactgcaaagcgcaaaccaaagctattgaacaaattaactcttctattcttagtagctggtcacatgacgaggttccacacattaaaatctgactcagtttagttgttccttcaacctttaattcctcactaaacaatcattattattattattattatcactataactattaatattccaataataactcattcaacctcgcaagaacaaaagagaaaaaaaaacctaacaaacgaagaggatccgaaacagaccattcgaacataggggctgtcgccgaggcaggattcgcagatgatggggaagtcggagcgttcccaaccgtcggcttcgtgatctctgagcaacctatgcgccatgcttagggaaacaacgacaagagcttgctcgttgaaccaaaatggaagctgaagaagaagaaacaagagattatggttctgtatttagcatgaaacaaaagggaacgtcttacattacattacatctgaatcaatatatattgtcaatcgaccaccactaatctaccagtagaacggaggtcggcggttgtttgcggtggccggtagaagacagtcagaggaggcaaagaaagtctaggtttcttacctttataatacagttaaaactttaaaagattagtagcctattacaaatgggtttcgattcaaatatcctatcttattgatagtttggagagtaaaattaggatttattttgtattcaaaatatataatacataataaatagaaaaaaaaatagaaaaaatagatttgtttatatgtattatttgtgtgtttgaagtaacaaaattttttttaattaagtaaactaatatttattattaattttttgatgagtgaaactttgaagaacaaattgtctaattttctaactttctttctatttctcacataaaaaattagatttaaacttttttaattttttcaattctatgataaatggaattctaaagaataaattttctttctatttttcacataaaaaaactaacttgaactttttttaattttttctggtgtagtaaatgcttctatttataatgttaaaaagttatggagttgggccttttcaaagggagaaaaaagaaaaaaaaatttaatatctctttattttttataaaaataaaagttatctcatatatctaatttaagaagcaataaaatattatttttattttataaacaattttcacatttatannnnnnnnnnnnnnnnnnnnnnnnnnnnnnnnnnnnnnnnnnnnnnnnnnnnnnnnnnnnnnnnnncaagtatttaatcatatccaatattcattcaactattcatcaactagtgtcataaagcattaggtgttcaaaattaaaacaaaataaataacttgttaattactatgataatatcatgtaaaaaaaattattatattttttattgagaacttcctattaacatatcaaggtaatattaactattaaaaattctcaattaaatcagtttaattatgacattcacatgtacgttatctatgtatgtaatttaataaatgagatatattaatctttatccaataaagaccattacacgtatattgatctatctggattatatatatcatattcacaataatcctacaataaaaaataatttaaattaaaattataaagacttgtttctcattatcataatctctatcatgataacaactctctaattttagtcaaggacttctcaaattaacaatttaataaaataataaatataataataaaataaagaacaattctttattaaaattgataacatgatggattgtatcttgaacatacacatttatctcctacacctcgtaggaatagaaaatgtttaaaacttatgagtataaccttcttgagaataacatatatctgaaaatatattatcataatctcttaataaacatgaaaatattgattattaccttcatattcgtgggaataaagaagatgacgtgaaacaacttttgtcttaatgttgaatttttgtttgatgtttatggcaattattgagcaatggcagctttgttaggtaggggtgaggattattggattctagttcgtgatgattggatttgggaactttagcgatgacacattgaatatgctcaactctttggcacaaaacaaggtggaagcaatctcctatttgtatgtttaaaataataagtagcaagtttgataattggatatctattcttgacatggattgtgttattattaataggtaagatgttgcgttggtccactttatccaagtttgcatttttttccacttagtagtcaaccctcatccatcatcgaatcattgctattggataggttcacgatttttactttgtgcaagtatacgtttttcaattattttgtaatttttagcattgaaattctgtcaatttgtttgctaaccttattttgtgtcctcttataggcttatttaaggaggaagctcccctaactcttactgcaccacaaaggcatagatactacggtgacagcttgaatcgcatacaacaactcaattctttatttcaaattagaatagatgactatgtagtagatataactagagatttattgtaatcattttctcatttatatttacttcttcataatatatagattgattagttcgacttattttgaactatgatgattaatgcaatggaattggtttctatgtgatattatggatactggtttggctcttcttgttttgttttttgttttatcaatagctaagtctgtctgtcaaaaaatactggtatatgtcaaaatacagagcagaattggatttatgttgtggctattgcataatggaaatgtgtagctgttgtgtccagacatatagtgctgctaaatgtatgtactatatggtttgatggtcattcacttgtgttctggtttcttactaacattgtataatcaatctgatcagcattgcagccatgtttttgtcaagagcatttggacaaacactctttgccgctgctgctgccagatcaaaaccttatgccactacagctgctgttggtagcaaggagagttctttgaggcagaccggagccctgatgatgacaaacctgttgtatatagtatgcactgggcatctcttttgttcgtttggatttgggatgacaatttttctctgattttcattatgatcagacttgtctggtacaaaaatttctgattttcttcattgacctttgaaagttgtgccgtttttttgctctcgttatgaatttgtttactttttttttatctatttgttgttaggtcggagttggaaggcatcggaattgcgtctaaaatcttgggaagaccttcataagttgtggtatgtgttgttaaaggagaagaacatgttgatgactcaacgtcagatacttaatgcacagagcctgcgttttcctaaccctgagcgcatccccaaggtatttcttcactccttttcccttgttctgtgttacataaatgttgttcttggccttttcttacccttagttatgtctacgtttggcatagaaaaatcacagaagtggtgcttttatcatattttcatgaacaatgttttgtatagatttgattagagagaatttgaatgttgcatgtttaactctataatggatagtattgagattctagggatttaggtagggaaggaagcagagagaatacaaactagtattcttttttttttnnnnnnnnnnnnnnnnnnnnnnnnnnnnnnnnnnnnnnnnnnnnnnnnnnnnnnnnnnnnnnnnnnnnnnnnnnnnnnnnnnnnnnnnnnnnnnnnnnnnnnnnnnnnnnnnnnnnnnnnnnnnnnnnnnnnnnnnnnnnnnnnnnnnnnnnnnnnnnnnnnnnnnnnnnnnnnnnnnnnnnnnnnnnnnnnnnnnnnnnnnnnnnnnnnnnnnnnnnnnnnnnnnnnnnnnnnnnnnnnnnnnnnnnnnnnnnnnnnnnnnnnnnnnnnnnnnnnnnnnnnnnnnnnnnnnnnnnnnnnnnnnnnnnnnnnnnnnnnnnnnnnnnnnnnnnnnnnnnnnnnnnnnttttttgtcatcctaattagggtcttagactcctgttaagatatttccacaagctttggtcctttggatcggttatggaactaatttttggttgagacttggtcacacttcctctccctctttaagaatgtattatgggagaatcgaatttattagaaactaatattctgaaattgatattaatttgatgtgataaataaggaaattaatcagtaattctgtcaatttattttgtgaaatcaggtgagaaagtcaatgtgccgcatcaagcaattgaagaaccggatcccagcagatctgctgagatgaagagaatgataaatgctctttgatgacttgaaatggatctgttcctgatggcatgttattgtcctaaacattgtttacaaaagttattgatggattcttacttgattttgtttaagaggcagtctcaacagaaatctaatcaaccacttattgttcccagcactttagttatttcaaaaaggtgcatctcattttcggtcaccccttatttttccatatacgagcaagtgtagattggtttacagggcaaaacttaagtggaccagtgaaacatatgatccattatggaccatatcttgtgaccggctatagaaggttgttttcgatattttatggttgcgtttatcatcttaaaatgtattattgttttaatcatttagtctagttctattttatcgttgcgtttatcacacggaaatatattctattgttgcgtttatcacacggagatatattttatggttgatctttgattttattttttagaataaaaaatgtcatttatggatcatatactaatatgtaaaaacataaaacaaaaattaattatattccttttgttttattctattttatttatcaaacatttttagtatatttttaattatgaaagatagtattttcaaaaaaaaaaataaaatataaatttaaaaacacactttaaatcctaaattgtttttgggggttatgtgtattgtactgaggtctaatgtgcagtgctatcttacgtaatttggaacgaacacgtttctcgttctttgtcaaacaacgatgcatgcagcccaaaccaacaacatacacttaagactgtctcagagtgcgagtgtgcgaagactatcttctataaaatcaatgaaaaatataattaaactaaataaataaagaaataaagtccgatttattaagacattatcaacgtactaaaagaaaaaaaaatatattatataaatcataaaaaatactatttttctaataaaacatttattttcttttaactttttaatattcttatgatactagtcggcgcgtttgtcaagaaaaaaagcggaggttattttatttcgctgactagtagcagcttttggcattacactcttggtaatccttccttctttttcccacatgggctttttacatttttgcccatcatggctgtaacaacaacaggagaaaaatccaaattgtgtcttcccattatctccctgtgtggcttttatttaaggtcataggaatggaagtgacaaagatgaagaatgaataaggcacatagcatctgatctgatataggtgtgaagatgggtgtggcagctcagtctgagtcaaatgacaacctcccactgttactcacccaatctctcaaaaggacaggtttgtgttgtgttgtcatctcaaatgttttgttttgtgcaaaagtgaatagatcatagtatagtataactaagtaacatggtggtgtgtgttgtgaatgtgatgaagggacggtgtggacagcagtggcacacatagtgactggggtgataggatcgggagtgctgtctctgccatggagcactgcacagcttgggtggcttgcaggcccattctgcatccttctcattgcttccaccactctcttctcttcttttcttctctgcaacacttatcgccatccccatcccgaatatggtcccaataggagtgcctcctaccttgatgttgttcatttgcatttaggtacgtacaaggtacaattccctttcttttcttcaacaatttaacatcgactctcgtgtattgaaaaaatcttatgagtgtctccagatgaacgatcgataatactccttccaattaccacatttggaacatttaatatggttctataggctagaatgttattttataagataagatcctctttcggtggtaacaggactaagcaatggacggctcagtggccttcttgtgaatataagtctgtatggttttgcaattgccttcgtcatcacaacagctatcagcttaaggtgtgttcattcatcacttatcatactgcttcctctcctgttatgtcacttccttttctttgttcttcttttcatccgtttgtgcaaaacaagatttttacactggtactccactaaggaagcatgtgtctatcccaagaatctcaccctatgttgccaatattaaatttgaactgctatttttatttgtggctgcagaacaatccaaaattcattttgttaccacaacgaagggcctgaagcagcatgtgaatctgtagatgcatattatatgctgctttttggggctatccaaattgttctctcacagatacccaacttccataacatcaaatggctgtcggttgttgctgcaattatgtcctttacttattctttcataggactggggctttccattgctcaaatcataggtatgcgtacggcgagtctttgcttaggctcacaatgactggcttgtaattattatgtagaaaatataattttatgaaaaaaaattgctcagaaaaaggacatgctgagggtagcattggaggaattagtacctccagtggagctgaaaagttatggctggtttctcaagcacttggtgacatatcattctcatatccgttctcaacaattcttatggaaatacaggtacataccccgtgaactcagataaccagaatgtaacttgaccacagctcgggggggtggggggattttaacaattataaagactgatataatctactgcaatccttgaaggatactttgaaatcgcctccaccagaaaaccaaaccatgaagaaggcctcagtaatagcggtcgccgtcacaacattcgtgtacctcagttgtggaggtgctggatatgctgcctttggtgataatacaccaggaaaccttttaacaggttttggatcatccaagtcttattggcttgtgaactttgctaatgcttgtatagtggttcacctagttggttcatatcaggtacatataaatatagagataccatctcaataattcttagtatggtgctcccatttaatatctcttcaattcctatattctccatcacctgtcttagggtagtgtgttatgaaatcatcatatagtctacttgtatgtactattatacattatagaaattagaatgcatgttcatttaagtgtcatctaacttgttttggtgcaggtgtatagccagccactttttgccactgttgagaattggttccgttttagattcccagatagtcaatttgtgaatcacacatatatgttgaaactcccgttgcttccagcctttgaacttaattttctcagcctgtctttccgaactgcttatgttgcatcaacaactgtgattgcaatgatatttccctacttcaatcagattttgggggttctgggtagcatcattttttggccattgaccatatattttccggtggaaatatacttgagtcagtccagtactgtatcatggacgagtaagtgggtactgcttcggactttcagcatttttggctttttatttggattgttcactcttactggatgtattaaaggaatagtaactgaaaaaataagctgagaagctttgagacctctccaaggaattagactcagatagcctacttttttcttcttccacttttctcgttgcaatggcctttccacacattcactcagttagtaacttggaaccattagatgaagacacgatctttattgaacggttgcaaatgcaaggaataggagactgcactgaagccagttggacattaaacatgcagattctctcatattttcaataggactggtggttctgtatttggtcacacgcggaaggtatccactactgaatgaatgaactcaaactcaacatttctacttcctcggttcttcttccactatgttatacaaacaaattgaaagtggactttttttctatttcatggtgaaattttcagctctaattgattttttgttttaagtcttatcgataatatttagattaagccaagcttggtataattacaagctcctcacaagtgaccctgcaatgttgttgaccttttacttcagtaactttgggggaacccgatcttagctttggataggattccctattgtaaaaaatacagtatttaatgtactaaacaatctattccctttgttaaaatttattgttaaactgcaaaacatccatgttctctgcatttccattcagagcatgacaaaattggagtatttcaagaaacgtgaagcattctgtttttgatttacccaacagttactgcaagtttcgttaacgagatgagatcaaacattcaaactttagtcgtaactaatgacctggtgacacacaaaaaaagaaatgtaaaatgtcaaaagcctaagaaatacaatcatgcagcaaatctctcatgatgtctcatatttaacatttataaccggtgagttacataaaataaagccgccataggaaagtgagtcagtagatcaaagagttcttttcatcaagtcttctgattcgttggcttgactttgctcactactatctttgtacaaaatgcaaaagagaatataatgaaggactggttgatttcaacaacacaagtatgatggcccaatcaatcattcttctccccatatgaacagcagaaacacagccaagaatgatttgccgacatgcaaattgccaatgtttacagactcaacctactactccactaattatataccaagctcagcatcaaactccatgcaatggtttactgaatagcaagacgcctctgtgaggtgtgctccgacgagatgcttccccgttgttgacctgaacagtccccttcctccgctctttcacccgagtgcaaacaaaaagtagatgatgactgcaaaacatttgcatagttgtgttcttcaaatctctcatgcacttgagatcctcttgcatcttgttgcacactaggcgaattccaggtctcggcagaatcagagggtagtgatccaaaaccagatgaactaattgaacgtgacaatgggacttggccagtacccatatcgttttccttgttcatgtggtttgaagccttaacttcagttttctttgcaaaacgccctccattacctcgtgctcttcgtatagcatgctgatgccgggattcatgaagataaggctgtgaagaaatagaagttagtatagtatgcccgaggacaaaatattaagtacacagtattatactagaagccaacctgtctcattaaaaacaaattttgatttttgacacgtttgtgtaaacctaaatgaagataacatcttattcttcttaatttattgagtctttcaagatccatagcatttcacatttaggtaaagcagcactcttgttaaaatcttctactgattttcaaatgttcaacggttcagaggttactagatttccaattatcttactttggtatcctgtgtagatataaacacagttaaaactccatgtcaaactaaagttttagctctgcagaaaggaaattggttgtagaacaacgtaaaataaaataaggtgacaaatatcccaaacctgaaatgtgttgagatatcactttccaaaatagattaaggcagttaactacagaactatagagtaacaatcatgcctacagaagcataagctagtgcacatttgtacctttctgacttttattaatttcttttcaagctctgctttagcacgagcctgtcttcgtctcagaattccttggtattgtttggcattcacataaacaggctcttgagccatctcaaggggcaaagccattctggcatgaggcattcctataaaaggagcgtatccctaatagtgaaaatataatatgttataccattgcagtgatatcccaatgtcaccattgtttgaaacaggaaaaaaaaaaaaaaaaaaaaccaaatagcatgaaacaaaattatcatgtaataagaatctatccttcagggttatgcacaaactacatttctaaccagattgatttatgggaaatgcaaaacagtgagtttgacaaactacatctaaaaaaaaaattgtatgagcactggctagtctcacatgccaactgttggtgcacatgtgctaccatcatacccccgtaataaggatttgaagcacatgcctgtagtaaaagaatttgaagcatactaggatccattagaaaagcatgcaagattagacaataatttttccaataattgaattttcatcattgacatgcagaaatcagcaaacatttattctattaaacatagtcataaagctataatctttgcaccctctcttcatgctaaaaaataaaaataaaaaataacaaaagggcaaagtcatacaattgagtggccaacaagttccagttgtggagcctgtgtaaggcaatcattacgcaccaaaggtgcagatgatgaagaatgttgcatcgcttggtggtcttgtccataatttccttccaagaaaagaatattgtatttcagtatcctcgtaaccttgtaagttgtaacacttggactaaaataaaaaaaaaaaaaaatcaaatgaacataatttgggccactatatataagcaacttttttctttccttattttaatgcttatatttttctttacaataaatctaaagcacctgattgattaggagcagtgggttgtggttctttagtggcatcatcatcttcttcactggattctgaatcaccattagggcgttcaagtgaagatgaattagatgcattcactcctgacattgcttgggggacaggattgcattgaatacctcgccaccagggttcagaataagcatggttaggtgtaaaggaatgtggatcagacctcagttgatttgcaatttcagatttggatggcatatcttatcttcagatccctagttccctacaaatgaatattggattacaaattttattccttatgctaaaacaaaaggcaagataaataaaagttgataatgacagtggttattcccctttacaataagagaccctccaatggaattaaaaaaatggataaacaaggtatttctgaaacaaaatcacgtgaagtgaaaactatagccataattgtctcaggaatgttgatgtccaaatcttctagaggtacaaattgatcaatatgatatcaagcacaactcacagaaagttacaatagtgctactgctagttcatagcttcattaatgaaaggctcttaaaatgcagcatgctgattgatagtaaatccacattaaaaagtttcatagcctcatatgtgtgaagttataagacatgtgcaacttaaagaaaattgagaaacccaaattcaaaattattaaaattcatcatgaaatgatataatacttgttaagcaaacagaggcttaaaaaaaaaaaaaaatagtttccattttgctcttacttgatcttcagcaggagccgcagctgtttgaaggtaaatataaaatctttcaactcttgatcagtgcccagcaaccaaatgcccctagaagaacaaaatcataatcagcaacagttgtttctgccatatatttaggcacacaaccaaacagcaccaggtgatatactgatattccaacatgcaaccatagctagtgttcacataagcagatacacactagctagtgagctacatttaatagaaaatcaccaaaatttggagtttatctgatcctagtacatgcaccaaaatcccaattctcccacatttgcaaccagaaaaacattcacacatcacatgtcatagaaaaaaaaaaaaggtttgggtgataccttgccagaattcacacatgcagacacagaaaatactaaccctaatcctcaaaatcccccaaagagaatgaatcacaattagaccaaatttcccaattgattaattaaggaaattaagggggtgggaaggcaaatcaaagaactttgctttctccataactagaatttggggtgctgaatgttgatatctcacttcagttgtgatatatgaggataaaggaattcattcaagagtcaaagtgaaaataaaaaaataaaataaaaaaaaagtaaaaaaatcttaactacaatagcaaatgtagtccagtgttgccttgcctgtttaaatttcaagtgacatcttatgatgacgtcagcatcaagtttcacggaggagacacgtggagagaagtgggagggaaaagggtatctgagagggggagggtgggtgaggatatcagagcccctgaagaaggaaaaaggaacacaatttatgggccacgtgacaggcacttgactagcagaatccggtgaacgcgtggcctaagggtggggaccacagcgtccgagaattgacagcattgtgaggcacgtgtccattttcctttgtaaacatctttttttagtttcctcggattaataattgattctccaccatataattaactctattttctttactttaaaaaagagggaaaggtgagccttacctgccagtgaggactcaggggacacgtattatcacgtcacagcccataaacaattcaatttattattttattagtgacttctaaattaaacaaattgagatctcttgcaaaacgtggcaccacttttttaagttgttgtcgtctttttcttctttttctcggagtaatttaagggcttcgtctatttttcttaattattttaaaaagcatttgccttttattttatttactatactataaagtaagaatttaccttttaatcatgtttggttcaatgtttgtttactttgttgggtcgaattcagttcggacgatatccatccacgtggaagatcacaagaaagtagttttctttctggtataaaatcagaagaaagtaatgaatttactctataaatttaaatgtgtttcaattttaaaagtgaaattatataataatttttaattattttataattatattgtaaaaaattatagattttataatatttaagtttataaagaatgttttgaataatttaaaatataaaaaataatttaagtaaatggaagttattgaaatcaagcattatttaaataatttctattgtattcttaaataaatatttatattttattaacactaatgtgcgatgagttgttatacgtatttagtattatttgtgagaagaaaatatactaattaataaataaaagttacaaggtattattattaatatatattattgctattattattattattgccaacaacaacaacggtgagttattcatgttgtaagcatactaccaagtttgtctagttgttaccatgtgtcaaagtcactctttttatttttattttcgcgaccttaatgtgtctagacacataatatacatgcattgaacccgctgttcgtccatatatataatatcaatactatacggaattatcaagaaattattgttattattnnnnnnnnnnnnnnnnnnnnnnnnnnnnnnnnnnnnnnnnnnnnnnnnnnnnnnnnnnnnnnnnnnnnnnnnnnnnnnnnnnnnnnnnnnnnnnnnnnnnnnnnnnnnnnnnnnnnnnnnnnnnnnnnnnnnnnnnnnnnnnnnnnnnnnnnnnnnnnnnnnnnnnnnnnnnnnnnnnnnnnnnnnnnnnnnnnnnnnnnnnnnnnnnnnnnnnnnnnnnnnnnnnnnnnnnnnnnnnnnnnnnnnnnnnnnnnnnnnnnnnnnnnnnnnnnnnnnnnnnnnnnnnnnnnnnnnnnnnnnnnnnnnnnnnnnnnnnnnnnnnnnnnnnnnnnnnnnnnnnnnnnnnnnnnnnnnnnnnnnnnnnnnnnnnnnnnnnnnnnnnnnnnnnnnnnnnnnnnnnnnnnnnnnnnnnnnnnnnnnnnnnnnnnnnnnnnnnnnnnnnnnnnnnnnnnnnnnnnnnnnnnnnnnnnnnnnnnnnnnnnnnnnnnnnnnnnnnnnnnnnnnnnnnnnnnnnnnnnnnnnnnnnnnnnnnnnnnnnnnnnnnnnnnnnnnnnnnnnnnnnnnnnnnnnnnnnnnnnnnnnnnnnnnnnnnnnnnnnnnnnnnnnnnnnnnnnnnnnnnnnnnnnnnnnnnnnnnnnnnnnnnnnnnnnnnnnnnnnnnnnnnnnnnnnnnnnnnnnnnnnnnnnnnnnnnnnnnnnnnnnnnnnnnnnnnnnnnnnnnnnnnnnnnnnnnnnnnnnnnnnnnnnnnnnnnnnnnnnnnnnnnnnnnnnnnnnnnnnnnnnnnnnnnnnnnnnnnnnnnnnnnnnnnnnnnnnnnnnnnnnnnnnnnnnnnnnnnnnnnnnnnnnnnnnnnnnnnnnnnnnnnnnnnnnnnnnnnnnnnnnnnnnnnnnnnnnnnnnnnnnnnnnnnnnnnnnnnnnnnnnnnnnnnnnnnnnnnnnnnnnnnnnnnnnnnnnnnnnnnnnnnnnnnnnnnnnnnnnnnnnnnnnnnnnnnnnnnnnnnnnnnnnnnnnnnnnnnnnnnnnnnnnnnnnnnnnnnnnnnnnnnnnnnnnnnnnnnnnnnnnnnnnnnnnnnnnnnnnnnnnnnnnnnnnnnnnnnnnnnnnnnnnnnnnnnnnnnnnnnnnnnnnnnnnnnnnnnnnnnnnnnnnnnnnnnnnnnnnnnnnnnnnnnnnnnnnnnnnnnnnnnnnnnnnnnnnnnnnnnnnnnnnnnnnnnnnnnnnnnnnnnnnnnnnnnnnnnnnnnnnnnnnnnnnnnnnnnnnnnnnnnnnnnnnnnnnnnnnnnnnnnnnnnnnnnnnnnnnnnnnnnnnnnnnnnnnnnnnnnnnnnnnnnnnnnnnnnnnnnnnnnnnnnnnnnnnnnnnnnnnnnnnnnnnnnnnnnnnnnnnnnnnnnnnnnnnnnnnnnnnnnnnnnnnnnnnnnnnnnnnnnnnnnnnnntaagatttttgaagtatttgtaaccgtagttatatatatatttatctttaattttttacaatataaaaaaaaaaacgacgaaactacgtgcaatcgtaatttaaaaccttaattccaaagtatctatctgtgtgcatgtgtacatttacacacgcaaggctgttgctacaaataatgattataaaccaagtagcaaaaaaaaaataaaaaatagtaacatttgggggacactatataagtatagatcatcaattccactactcttattttatcacagaaaaataaattcccgtatgagtagcgacaagcgagtagagcaagtagcatttagcaacataaaataaaagcaaaaatatgagaaatttcttgagattctcattctctaataagagagaccccttcatttgattctcatagactgtggggccgaactcagagacacgtatagtacagtcacacatctgacaaaattatttcagatttttaaaataacatttcacttttatttcatttattttttgttgaaaaaccaaaaaccaaaatacacacttatttgtgggatttaggcataccaattacaacttatgactataaaaaaataccaattacaaattattgcccggaattaaactcctaaaaatacagcctagatgtgtcaaaatacaatcaatacataacaaaatactttctccatctcatctcattatattttggcttgtctcaaaatatgtttcattttataaaattaaatatattaattatttttctcccacattatatcaattcgtttattggcatctgatcacctgaatattttaaagaatttataactatatttgaactctttaatttgataagattaattttgccaacgaaaatccttttatcgttataaatggaagggtcatctacccacacaatttttttaaagacaaaaggtacgtagctactaattaaatatcaaacttataatcatcatcagttgtgcagaagaaattagaagaaaataaaataaaagatgaaattgaacagaaaggaagtatacatgataatatgatcgactttaatttctctcagagcaaccacttgactaaactatgttttgttttgtagaattccaagctatgacgctcaaatctaaaaccaaaaccaatattctttgcactcatcacagcacccttcaaattaaggtcagaaaatatatcttctatatataacagataaaaaagaaaataaacttaaaatctatatctaattaggagagcacacgtacccctagctaaatttagagagagacaaatcctacaacttgttaccctcctaaagttagcagaaagatagggtgaataactgttcctaagatcaatcactccaaaatcctccaaggttctctcaatttgcaagagatgtagaaaaaactaaaagtacataagaaaagtccatgcatgttctaaagtttcacgagatcgtctacttatatatatatatatatatatatatatatatatatatatatattaattagcaaacaaatgaaacgggaagatcttgaagcgcaaagcagaagaaggtctctatgtctggtggtgcaaagaatggtaagggtgatctaggcaaagagcaatcagagagcacccttggattcttctttggtgctggagggcatgttgaaacttctggtatccgaaacttttcacctttgggagtggaacacacagcagcagcaacatcagaatccatgtcccttttctttggtgtttcttgttttcttctctcttcatgctgcttcttgcaatggcttcttgccagctttcctcttgtttttttcttttttcttgaagttgttggttttgtcgtacttccagaagggaccatgtcttgatgacttgatagaaaatgcttgtgtgagtcagctagctataagctaggttaattaaaagaactggtaaatgtttctaaaacaaaaagctggcaattggaagaagaagcctgagacttaaccaggtagagaagatataactaactagtgtaacaggagaggacacaagcttatcctattggagagtgctttaaaatggaaatgatatatatttgtccaaaagaggattttgtaaatgttgaagtaataagtgtgtgagacgaagctttagattgaataaaaatgaaaaggttgaatattatatgactgtgaaaaagattcataaattttaacttcaagtttttgattaaaatgtagttttatatatgatttattgatgtaaattttcttatgtttatctctcgtatgacaaaagaaatgaagtaatgattcctcaagaaagaatgtataacattttgtgtagctgacaccgaaaaagcaactcctttaactatgacacttacactaaagaatggacaagtgatgaaataaggaatccaagacaagatttctttaaaaggataccaaatatatatatatatatatatatatatatatatataaagataaagttgtgtataataataactctctcatgcacatttacgtaggaaaaatcttctaacacttactaaagcacgtaaattaattagtattatatctgtattctttttatctctttgacgtcaaccaccagaggccagagccaaggtgtctatcggccatttcattatttgaagatattaattaacctggtttctttgttgggctttacctaccatttaaccctagttagggagggaaaaaggagaaggaattggaggcagagattttcacactcatacatatatacgtcttgtcttgggggcctatattatggttataaattagaatggccgacaaagaggggtgaaaaagcggctcgttcaaatattgtgggacctattggacttatatttggtgtacgatgactttaagtttttggatcactaaaaagggtcggtgacacatccacactattcttttattttggagtttttaattgcatgcacacattagtttgtgggctaccccacttagctttagattttgaactttaagacctttatcaaaatagaattcaaaatttagtacaacttttaaggccttaataaattttgaactttaactaaaaagggaaatgataaagagtacgaaacaatttcaaccacatttattcaaaataatttttttctctccacttatccttttctattggctgtaaagtcatttgaaagtcgtaacatttttttattaaagttatttattatcaaaataacattcctagctatccaaaaactgcaacattattttaattagtttatcaactataaaagttcaacaaaattattttttatgcaaaaatcaagaaatttaataactaaattattttttatcactatttaaagacttaattgtattaccagtccccaaaattaatttatcaactgagtggttttagtagttatatcaaatgggtgattttacaacaacaaaaaatttgtggttaagaaggaaaataaaaaaatcttttttaaaggtaattttagtagtttatcaaagggataattttagtctctaattttctcaaatcaaatccttatatacttttaaaaataataaaatctagtccaatattaaaacttcaaatttctttacaaggtgagatttgaacttagtacgctagtccaacatatcacttttatttttttaaataacgatactacttatattatgccacaataaatcacacacacacacacacacacattttgtttggatagctatatatattttgtttggataactactataattaattctgagacccaaaattaaggtgaaattttgaagaaaaaaaaagtattaaaactatatattactttgactttcaatgtgatttaaaaaaaaaaatctaatccaaacatgctaataattaacatacgagacagaaaaaatgaatcaattcttcaactaaagacaaagaggggagggacaggagctatacgtgtcttcattttacaaattatatttgactaatcttagtataattctagcatgtttggataagcttttttgaaaaatattttttaggagaagaaaaaaaattatatattaaaatattttttattaattaatttatagatattttttcatcttaattaaaataaatttttattaattaatttgtaaataaatgaaaaattaatgcaaacatatgtttaacatgtttaagttctgcataaaacaaattaaaatgtagtaagtgaataaaacagttgagatttgagaaggatagatagtaatataataattattttttgttatctgtctacataaccaataacgcagagtggcccgtggccgagaagcagagttttgttcattgatccaaagctattcagccactgtcactgactgatatgtttgtctgtgaattatttaattgattaagagcgttgaaaaatagcagagtttttgtcttctagtcctcgtggcatcacctaatctaatcagaatcacaccacaccacaccacaccacacctcacagttttcaaattgcttttttgttgcttctccatatataggatcctactagaagggtttttttggacagacgtgcgtcatgcatttgctcctatacattaatttgtacatatattatatgcatatcatgccacatttaccactgttgaggtacaataaccaagaatttttgcaagttttaatcaattttggatagataaacacaagtcaaaaggagtttttatataaataaaatgaggagtatatgctcattgactaaaaaggtcgggaggagagggaaatggaaaaaaagggaagagtatagagtttatttataatctgcttgcttgtttaaaatcttctaaattcttttaaattggggtaactttaaaatgttgattaaaaagggggatttttagtgattacacaataattcctcatcttatactcattctagcaaaattcaaaaacaacaaagaggtttaacatgaaaagtaaaaacgttcctctcatttttatttcttattagaaaaaagacaaatgttaatcactatatcctaaaaacattagtcaataaacttaaaagtaaaaatatttttgttgaaagataaaaaaaattacattatacatgattttttttcgttctcgtataatttatgtaataattttttttaatttattaactaatgtttaaagacactgattaataatatctttaaaaaaattataaaaaggtctccctagctccaaattcattataacatgattagaaatcttctaaaagtagaatttatatttagtgtgtactattaattaattcaaattagcatatatataaattagaatcatgtttgcgaaaacaaaaataagaaatcaaagtatctagttatattctcttattattaataatagttgaacaattccattatgttatccttgctagttactagcacttagcaggaaaaggcaataccaatgtatgctcagttgactattttccttgatcgatcatatttaaatgtcacgcgcgatgtgtgtgcgtggattggtgacaaacccaagtgtgcaactgaattgaaaagggcaacgttagtttgaaaatttaggacctcagaataattgtttggtcaagattcacttaaaaatcccagcttggttttccaaaagagcatgcatcttctatctttcatctgtgtttgaggataggataggatggttggtggtgtatctgttgcggtggagtcgcacagttgcccacgcttgtacgtggatgctatggccaccagccctagcagtaccggtatcagtgttttgtgtctcaagaggaagcacttgttgaggttgaggctcaccacttccttcgttcagagtcacagtgttaatacaattttcaagaagcatcgcaggcacaaggacaagactaagagactctctattgtcaatgagctcggtggtcaatatgaggacacttttcatgatgtcaaaaaggtactactacttaacatactcactcccttcataaattcttagctagtctgaaactataatgtgttgtgaatatttgaatgacatctgatcaagtattattaattcttctaataaattgtaaaggtttaatatttctgttaatatatagacattaatagtcagatggtgatccgggattgtttactaatttctccagggtcattgtgaatgaatatttaattaattattttgctatgagtatataattatactcgtgaacagatctagtttgtaagttgggacatcttaaattttgcaattaaaatattaatatatttttagcacttatttgttgtgtttgttaattatttttagtgcttgttatatagtttgcagtgttttttaattatattcatttgtaattcatgcattaatacttgtttataaggtaattaaagtctttattcttcattgaaatgagaagtacaatttaactatatacattttgtagaaatattttagtttatattgtaacagctcatattcaaagatctcaaactcaatacttatatttaaattaattctcatgttgtcatcatgattttttgaaatctcatcgcaagtttcaataagtttcttttattattctattcaattcagaatagtaatttcgtctgactatttgtttgttcttttagattatgatttataattgtttgttcctttaaattttctttacaaaaaaaaattgcggagacgctatctgtgaatcccgtcattaaatgtacggacataaataaattttcttggatctgctactagtattcctcttgattatttttttgatccgcaactgattatactactattccttgcttgcaatttgactggcttcatcttttatttggatacagcaaatactcaattatttcacatacaaggctgtgaggactgttcttcaacagttgtatgagatgaacccacctcagtataggtggttctataagtaagtgaaatctacgttgttgtagctagtagctacaatgctaatttccactcaaacttctatgctcttctaattactatttattttagtttcaaaaatgatgtttcccttcagtcacatgttaagtaagcttctaaattgttgactgattgaacttgtgaaaaagagaagattgcatacattcaactgtaagtatctcttctttttttttattaattattgtaaaattagaactctgtgcgtttactactctcaaaacttgccactgccagcagtggaagtgctctggttcggtttgattattatacttgaactggtatctcatatatagattcttgatcccagttgaaaagttgctctgattgcaccttatgaaaagttgaattaggattctctgcagttggggaatttccacattcacgcattcaactaatcagttgaatgaaaatcggacagactcgtattttatctcgatgaatctagcttaaaatatgtatccgaaatgtgaatgtgtgaatacaggaaatctatttccataagaagtcttgaatctttgatcgataaagcggtcaagtagtaaatgcacatcgatacctttcgcaatttctagttttctacaacatttatttggaccttaatagattattacaagcaaataataaagttaatcaactttttgtagacatagtataaggttaattttttagctaattgttagttgttttccatgataacagtttcgttgcaacaaacgacccgacagataggaaacattttatacgatccctcgcaaaggtatgtgctctgctcagttatatcatttgttgataattttcagagtaggaagttgagtcttttgtcttttgattactctcttgaaaatttactacaattttgtgaactattacatgtttaattttttgaaattaaaaagtactataaacaacatttcaagtgcagctcaagagttgctattttaagctgttttttctgttcgttttcttcctatgccaaatgttaaactgccacaatgttttccaatactgatgctggttaaaagaaaaatcatcctcgtaagcatgctatggtctttttgcagtgctgaaaacactttcacaataaactactaccgaattactcggtgtatagcttaataaactactgatcagtttgtgtttccttccattcaacacctccaattttcatgtctaatgcctttgcacaggatatattgttcatataattttctataaacacattgttttgataattacgtttcacaatgtgttacctgataacattggaaatgatgtcattatgtttttttgctcgattgctaggagcaacatcaacttgctgaaagagtgatgataacacggcttcacctttatggcaaatggatcaaggtaattgaactcaaaattatcgatgtcaatcttttcggttgatctccaaggcatgtgataatcttctgtaaaggggtgatgcactccgaattataacctttcttcacctcttattgccatgcagaaatgtaatcacgctgagatatatcaagaaatatctgatgaaaacttggagttgatgagggaacggctcatggaaactgtaatatggccttcagatgacacaaacaccgaaaaaatcggctgataagttaggactttcgatctcttcttttcccttcagtcttttaatcttacctctcccttgtctaggtataattttttgtttcaatggcaatctgtttctaaattggttgtctgtatctttttctcttactagatttgctagtgatacgttctgtaaattgtgtatatctctatacctttccatataagatccattatttagatagttgaaatgaaggatttacaatagggattaaaaattttaggcatttgtttgagtgtaaccaatcgctacaatctattagccatgttagcttccgaagtttatggaaaagtaaagaaattattatttcttccacagggttggtttactcaataccttgcacgatgtatgattcaacctcaagcagaattacaattatcacgaacagaaaaaagtagaagtgtagtttaattgaaagtaattttcaaaagttaaaaacatgcttattttcaattattaattttcctcatcagtaaaatgcttattttttaattttagtaagtaaaataaagttcgcaaaatgttttgcatataaagaaacaaaattggactatcattaaaaaaaaactgaagacattattgtattttacttactactcatttaactcaaagaaattactcaaataaagattttttaaggaaaaaaatcataacagaaatattnnnnnnnnnnnnnnnnnnnnnnnnnnnnnnnnnnnnnnnnnnnnnnnnnnnnnnnnnnnnnnnnnnnnnnnnnnnnnnnnnnnnnnnnnnnnnnnnnnnnnnnnnnnnnnnnnnnnnnnnnnnnnnnnnnnnnnnnnnnnnnnnnnnnnnnnnnnnnnnnnnnnnnnnnnnnnnnnnnnnnnnnnnnnnnnnnnnnnnnnnnnnnnnnnnnnnnnnnnnnnnnnnnnnnnnnnnnnnnnnnnnnnnnnnnnnnnnnnnnnnnnnnnnnnnnnnnnnnnnnnnnnnnnnnnnnnnnnnnnnnnnnnnnnnnnnnnnnnnnnnnnnnnnnnnnnnnnnnnnnnnnnnnnnnnnnnnnnnnnnnnnnnnnnnnnnnnnnnnnnnnnnnnnnnnnnnnnnnnnnnnnnnnnnnnnnnnnnnnnnnnnnnnnnnnnnnnnnnnnnnnnnnnnnnnnnnnnnnnnnnnnnnnnnnnnnnnnnnnnnnnnnnnnnnnnnnnnnnnnnnnnnnnnnnnnnnnnnnnnnnnnnnnnnnnnnnnnnnnnnnnnnnnnnnnnnnnnnnnnnnnnnnnnnnnnnnnnnnnnnnnnnnnnnnnnnnnnnnnnnnnnnnnnnnnnnnnnnnnnnnnnnnnnnnnnnnnnnnnnnnnnnnnnnnnnnnnnnnnnnnnnnnnnnnnnnnnnnnnnnnnnnnnnnnnnnnnnnnnnnnnnnnnnnnnnnnnnnnnnnnnnnnnnnnnnnnnnnnnnnnnnnnnnnnnnnnnnnnnnnnnnnnnnnnnnnnnnnnnnnnnnnnnnnnnnnnnnnnnnnnnnnnnnnnnnnnnnnnnnnnnnnnnnnnnnnnnnnnnnnnnnnnnnnnnnnnnnnnnnnnnnnnnnnnnnnnnnnntattttttactagaattatgtcatcaaagtttaaattaaattaaagaaaaaaattgagcaatagatcttatcttattatgttttttggggaatcatatcttattcttttgaataataacaagttgattgttttcacctttcaaaattttaaaacttaaatacctcttatttcaaaaatgaaataaaacataattggactacctttaaattaaaataatattatcttgatggctatgtatataatattaattaaaggcaaaaaaacaacattttttaaattatatacctaaaaaaacattgtttgtaaattattgcgttgttacgtataaagtacaagtgctaagtttggttcgcagttctgtcaacaaaaaagaaagtatggttgtcaaagaattttcataaaaacatcacaataatttacaaaatacacctcaatcattaccccttgacatgttgcttacacatagaatccaaccatttgtcaatatcccagcatcagaaattcagaatgaaattgaaactaagttctaaaattnnnnnnnnnnnnnnnnnnnnnnnnnnnnnnnnnnnnnnnnnnnnnnnnnnnnnnnnnnnnnnnnnnnnnnnnnnnnnnnnnnnnnnnnnnnnnnnnnnnnnnnnnnnnnnnnnnnnnnnnnnnnnnnnnnnnnnnnnnnnnnnnnnnnnnnnnnnnnnnnnnnnnnnnnnnnnnnnnnnnnnnnnnnnnnnnnnnnnnnnnnnnnnnnnnnnnnnnnnnnnnnnnnnnnnnnnnnnnnnnnnnnnnnnnnnnnnnnnnnnnnnnnnnnnnnnnnnnnnnnnnnnnnnnnnnnnnnnnnnnnnnnnnnnnnnnnnnnnnnnnnnnnnnnnnnnnnnnnnnnnnnnnnnnnnnnnnnnnnnnnnnnnnnnnnnnnnnnnnnnnnnnnnnnnnnnnnnnnnnnnnnnnnnnnnnnnnnnnnnnnnnnnnnnnnnnnnnnnnnnnnnnnnnnnnnnnnnnnnnnnnnnnnnnnnnnnnnnnnnnnnnnnnnnnnnnnnnnnnnnnnnnnnnnnnnnnnnnnnnnnnnnnnncaaacatattattgataaactagtaccagaacaaagtaaagctaaaaacaggggcgagcacgtatgaaaaataatgaggaaaaaataaatcttaatccccaactaaaagactacttcgcagttgagcctaaataaatatgaacaaatctcaaagatagaaatagaatcatcatctttatgaagtgcctatataggaatatttaactacaaacaacattatatcatattaaccaattaaggttaagcaggaattaacaactaaataacagtcaacaattccaattttcaatagcatatttagtaaagttttccagtggcctgcataaatagaatagaaatgaacctctaggaaagacagcaaggaagtcattgaaatacatccactgaagcataccatacttgatgctgaagcacaaggccgatacaccttacatataaggtgggaattgggagaaaataaattctatcgagatttctctttccctgcagcccaagggctttgaatggagtaactgattacaattaactatcaccaaaagtaataatctgcccaagtgcttgtcttgcacgaagctgcatcaacaacaacaaaaaaaaatctacaaaatgactaagagaagtatttcctccagactcaaatataagcaaatctaaactcaggtatggtggtccaaaatataagtaaatctaaactcaggtatagtggtccaaaatataagccaatcttaattgattccaccctatttaatgaaatcattcccaaaatgccttttatttaattcaaattttattttcaatggcttcttttattctcatgatatcaatcacatggcttttaaaatggagagagtattcccatttgaaacatattcccatagaattgaagtcttccatcaattagcatgaacgatgatttaggaaatgaagttcattttataaatgagatataagaaaattaacgaagttaactaacattcttaattagcgagaattagttattctttacttatgtttgactccaaagagagtatagaacaagaccagtttgaaatgaagattaaaagaccttcacatccatgcgaggatcgttgaccatgttcttgatttgagaaacaatgcctacattaagcagttttacaatcctaccaaatggcccaggacttgcaggaaaagtgagatttactatgacccaaacagcagatgtgcgtaatcgactgtcattgctctgcagaaactggttgaagaaagagtgagacacattttctgcttttgtagagagtagctgcatgatagcttctttatgagactcatttccacttgcaatattgctgagtaagtacatcccctacacaaaataaaaagataatcagcttgaagattaagatttcaatacaattgcagttttcttttttcatatgctcattgtgttaatttgttatttccatcctgtcagggaaaaatactttgttcaccctttacatttccatttgagatctccaaaatttattaattccctctatttttctctcccaaatagcattaacagaacgtcagaaccatgctatcaaaatgaagtaatctaaaggtatagatattaatctcaaaaatgacttcattgaaccatacaagtaaggaaaaatgatgaaggtggatctcctgttggcagttgcccaccataaacattttatgcaactgatttacagtggtaattgttagaaatatcaaatatgacaaggacatagaggctcttataccatgcccccaccatgcattgtccatgcttcaagcccataggtttttaatcttcgctaaattcttcttttagttaattctgaggcgttgacagtaacgtgtttcgggtgcggtttactttcaataatcaaaaataaatatcaaataaaaagatgcgatttgatttagatatatcattaaatctgaattgagtaaaacaaatcttttatagtttaatttgacaattttttatattttttaagttactttcacaatttaaattttattgatcaaacttacataattattatgttttattattttaaaaatatttttttattaattttgaaaagcatattttagttaaaaataactcttttcatattataataataaattttacatcagttgatatttaatactaattttaaataatattagaatttctttttttaacatatgaaaataatatatgtatcttgattacaaaacaaaaagaaatatcataaattatttaattcttattattagttattatgataaaaaaaatatgtatattataaacttattatagaaaaaaatacactataaatcacatactataataattaaaattgaaaaactatctacataatattaaacatccattcaataaaataatataattgtgatgtgttatttggttagattttaatgacaagatcaaaaaatcaaaccaannnnnnnnnnnnnnnnnnnnnnnnnnnnnnnnnnnnnnnnnnnnnnnnnnnnnnnnnnnnnnnnnnnnnnnnnnnnnnnnnnnnnnnnnnnnnnnnnnnnnnnnnnnnnnnnnnnnnnnnnnnnnnnnnnnnnnnnnnnnnnnnnnnnnnnnnnnnnnnnnnnnnnnnnnnnnnnnnnnnnnnnnnnnnnnnnnnnnnnnnnnnnnnnnnnnnnnnnnnnnnnnnnnnnnnnnnnnnnnnnnnnnnnnnnnnnnnnnnnnnnnnnnnnnnnnnnnnnnnnnnnnnnnnnnnnnnnnnnnnnnnnnnnnnnnnnnnnnnnnnnnnnnnnnnnnnnnnnnnnnnnnnnnnnnnnnnnnnnnnnnnnnnnnnnnnnnnnnnnnnnnnnnnnnnnnnnnnnnnnnnnnnnnnnnnnnnnnnnnnnnnnnnnnnnnnnnnnnnnnnnnnnnnnnnnnnnnnnnnnnnnnnnnnnnnnnnnnnnnnnnnnnnnnnnnnnnnnnnnnnnnnnnnnnnnnnnnnnnnnnnnnnnnnnnnnnnnnnnnnnnnnnnnnnnnnnnnnncatttttgggttttttttttatcaatttcgcgtgttaatagattttttgtaacgcacatgaaagaatttagtgctggtgtatatattaatgttatcctatgattggagtccactattgaattttgaatgtgcacaaaagaaaatataatgaaaaagttaaaggaaatgggccacgacagcttcgatgatccttctacttcttctagtttagtcttaatggagcatatttggattttgtttggatctctacaggtgttgtgtgaatgcattgacttcgacgcatccgttggaatgttttccaaggccagaatctgtgattcctgattgcctaaagtatggagtacattttttaagaagatgtcgttaataaatttctttaaaatattaattaaataatattacatatatttagaaaatattattaattatttttaactaaatattgaataatttttatatttgtttgatgtatatgaacactgtttgcataaaacaattttgaaaaaaaaaatactatccaatgtctcaaatatttgaactaaaaaataaaatatatttaattattttttaaattatttccaaagaaacataaaatattttagacttaaaacagagtacgaaaacttcgaagtatttcatcattttttcttttgagctttatttataaagcgtttatttctccaacatatactttgttgattcacattcagattcaaaccaattaattctgtcaacatatcacaagcttactaattgattcgggaagaattttcttatggtctctttcaatttttatcgtcatttaagttcgaacacctaattaagtgttgttttatttaatgaaatataactacacaaactttaattttgcctccaccaattagaatagtacttttgaaagaaaaaaaaaggttatctcctactacacaatttacacacacaattaaaaaataccgaagttatcttgattaaattctaaaaaaaaacatatttggtattaaattcagttgtctagctactatatccaacgcattattatgaagcacatgaaccgtaaacatattttattttcctttatatcattatataaagttgttgatcacattcaatggagaaagataaaaaaagaaacccagataagtggagacataattaatattaggaacttcaagatccaagatcgaactccattactccatgtggcaactggcaacaacatttagtcaaaatacttcatcatatgtgaactattgtttatttaacaatttggtattacttagctcaaaattgataagtggtgattttgaaagagtttaataagcatgcataatagttttcatttttgatatatagttattataaagaaaaataaactactgtatattattagatttttgccttttacatattactctatatcagtaatatttataatattaaccaaaacagctaacataaagtaagtgttaatgatttatatcttttaattaaatgattaatatttatttgaattcttatagatctttgattaaaaataaattatattaagagaaaaatatataatttgtgtatgtgttcaatatctcccacacaaatttgtcacactttcaaacgaatgaagttcataccaatggcatgaaaaaaattatattccatgcaatccaaagtaggaaccttcaaataggagggtggatgacccgttactgcacgtccgtgtcttcccgtgccagttcctccactctacgtctctaccaaccagtccaatttcctttcctttctctccgttggacactgcttcgtcgctctctctctctctctctctctctctctcaattggctttgcttcccttttcatttattggggcagcctctctgcaatacacagataacttagattacttcgacatgctcatgtcatcattcccagcttttcatctgagtggtgagaaactaaattgccctttattgcttcctacgcttttctatgttgaaccatattttttttatattctagctatgactgattgcgaatttggaattacttgctttggaagttctttcatttctattttgtagttcgtttttttgtaataactgcaagttttgtgggtgtgatttgtgaagggagatgagaagaactggccgagcttttaaaaaaagaaaactggtcttgttttttctctgaatttgggtgtcatggagttcccttcccctactatgccagtttggacccttttcttgttcctgctacttctgaagagtgatgttgtgcaatcggcttctgattccttgattggtatgggaagctatgacattaccggtcctgcagctgatgttaacatgatggggtatgccaacactgagcaaattgcatctggggttcacttcaggcttcgggctcgggctttcattgttgctcagccaaagggtaaccgggtagtgtttgtgaacctcgacgcttgcatggcttcacagctcgtagtcatcaaagtaattgagaggctgaaagcaaggtatcaataatgacttctttgctctcaagaaattactattatgataataacttgtagaaattatggaagattaattatatgggagattttcttatatttctgtgagtggcagctggaccacccgaccgaataagctgccgtggcatagttgaccaaataactgcctatgcctttcaggctagaagcttgagggactatggaccattcggccgattaagtaggtcacagatggctgacctacactagtaagtccgagcatttactatggccaattcactctagggcattaacaataataaaggtctagatcctcctcacgcgtgactaaggcaccattcactccaccctccagaaaaaaaaagcaggaaccgtaggaggacacacttgttatataggcatgactaacccaggtcacactagggtatgattggtagagtctcatcagggtttcttgagttcatattgagctttaggattctccggcgattgtgttctctagcgtgaaaagcggctgatgtttccatttaatttgtttgatccctaagttttgtgcctgattttgtactttattttgtttgacagatatggtgacctatatactgaaaagaatgtggctattagtggaattcacactcatgctggtcctgggggttatctccagtatgttgtgtatattgtgacatctcttggatttgttcgccagtcatttgatgtcattgttgatggcattgagaaaaccattgttcaggcccatgaaaatctccgcccaggatcaatatttgtcaataagggtaagggaaagacttgtcattccttctttgtcctttctcccttgggtacttatatttgtatacagatgtgagcacaggtggataatttaaatgttatgtgtaaattattataattatggtagttttgcatactgttgaagcatgtcagaaaaagatgaaaaactgcaagaagcaagttgcaccaactgtctagaaataaatgaatggggcaagcctgagctttttcttataggatgtagggttttcccatctttacttttcctgacatccttaactgtattaagaatttgtttagtagtattattttgaagctatcaatgtgatttctagtaagtgcactagttagtagtcatatggtttaactattatgtcatttctccctctctttgttgattatatcgcatggtttgagataaattatcttcaacttgcaggagagctcttagatgctggtgtaaatcgcagtcctagtgcttatctcaacaatcctgctgcagagagaagcaaatttaagtatgatgttgataaagaaatgactctgttaaagtttgttgatgatgaatggggtcctttgggaagtttcaattggtttgctactcatggtacttcaatgagccgaacaaactcattaattagcggggataataagggtgcagctgcacgatttatggaagactggtttgagcgaaaagggtctgtaagaatagattcggttggatttgaaaatgatggaatcccccgaagaatttcaaacataattcccagccttcatgataatcgtaagatgtttgcttttggctacaatgcatccattgataaactacgtagcttcttttccattacagtatgttcattacatagcttcagaatttataggtttatatgccatgtgatgtgggtccattgttctagcatgtttttgccttgcagggtaaaggcttcaaatgtggtttgaccaaaggatttccccccttttgtgttagaaattagaatgtataaaaaattctaatcatattttagaatatattagattatccttacagagaaatagttgctgtagaaaatcaacaagccttaaaacagtccaaagagtaagagcaatcaccaaacaacaagaggaaaatttgtactttggcaacgtgctggattgcctcttgtagttagttacatgtattctgagctctgatccggtgcttttgagttttacaagtcttctcatataagtcctaatattggtggagttaatggagttttctacgaacaagacaattgagcaaactaatgaaacatacatgaatgatatcttgctttatatatgtggcataaatagtttatcaataaggtgaatatatgatgataataataataattaataaatgaatacgtttctaaccccacttaaatttattggtccagaccgtgaattactggaacttgctgcctcattccaatctcctcctggtaaacctgcaaccaaaacttcaagcgttgctagacgtgtgagaggtgtccttaggcaggttgacaagcctagatttgtttctgcattttgtcaaacaaattgcggtgatgttagtccaaatgtactcggagctttttgtatagacactggactaccttgtgacttcaatcatagtacatgtggaggaaagaatgaattatgctatggccgaggacctgggtaatttttattgcatgctcaatgtttctctgtttttctacaattttcctaatcctttatggttgctaaagtgtctcctataaactgatgttgcagttatccagatgaatttgaaagcacacgtattataggggagagacaatttaaaaaagcagtggagctattcaacggagcatctgaacagattaaagggaaggttgattttcgacatgctttcatagatttctcccagcttgaggtaaatccttctaaagtaggagcttctgaggttgtaaagacatgccctgctgcaatgggatttgcatttgctgctggaacaacagatggacctggagcttttgactttaagcaaggtgatgatcaggtaaccactgataagaccttatgcttacctattatcctggccttgtattcttaaatatctttgaaactctatgattattatttcttattgtatgtcagggaaatcctttctggaagctggtccgtaacttacttaaaacgccaggcaaggaacaaatagactgtcaccgcccaaagcccattttgcttgatactggcgaaatgaagctaccatatgattgggcagtaagttactcatttgatgttctttgatgatggtagtttcatgtttctcttcacccatttctgccataaagatatgctaccatcacaaggcatcttttttcaaaggatatatttcttcatttggccctgattgcaaatgctctcactgatgaaacaaagagtctgatttttgataacttaaactaatttgaacctttatttgctcatgttcatttgcagccttcaatacttcctatccagatcctccgagttgggcagcttgttattctcagtgtaccaggaggtatgagctcttttttttaatttcttaaaataatgttattgttggaatttatatcctttgcattttgaaacatttaagtttcaacatcaacaaccttggtcgaatgagaatatattgagtcaaagaaaaaaaaatatgttgaaccgttattgggatcatgatattttgatgatgtctattccagcaatactgggttcaattcaaaggatggctgcatctgagttatgcgagtctctcactatttatttttgtgtgtgtctaaatgttttaagatccgatgtaatccaaaatccaaatatgttgcttaatatgttgtgctattaaattatatatttgtatggttattttttttcctggcagatctatatttatatttttataccagtatttgtgaattgtgagacaatctaatctggcctatgtatttctttgggtgcttcatgcttcccgtaattgatttacttctgacagaatttacaacaatggctgggaggcgtcttcgtgatgcagtgaagacagtgctaagtggtagcaaaggctttggtagcaacattcatgttgttattgcggggttgactaatagttattcacagtatgtgactacatacgaagagtaccaggtgcagagatatgaggtcagttacaactcttatggaaagagacatgaagcatgcagcaaacctttttagattgctatagcaaagagtaaatgcaacattagtggaaatttacatttttagggatgcaacttatcatcaaataacataacttcatattggcaagagatgtaaccattatgtgctgctttatttaacttcaattttcatgttaccagggtgcgtccacgctgtacggtccacacacactgagtgcttacattcaggagtttacgaagcttgcgcgtgctctcatcagtggccagcctgtagaaccaggtccacaaccccctgacctccttgataagcaaataagcttattaacaccggttgtgatggatgcaacccctattggtgtaaagtttggggattgtagctctgatgttcccaagaactcaacctttaagagaggtgacatggtgtctgttactttctggtctgcgtgccctcgcaatgaccttatgactgaaggtacattttccctggtggaatttctccaaggaaaggatacttgggttcctgcttttgatgatgatgatttctgcctgcgcttcaagtggtctaggcctttcaaactcagttctcacagtaaagctaccatagaatggagaatcccacaggatgtaactcctggtgtatacagaatcaaacattttggggctgcaaagggcttgttaggatcaattcatcactttacaggttcatctagtgcatttgtagttgcatagtaaaggggggcatactgattgattatacatgtttaatggttcgaacactgttactactatattgtggtttattgtactaaactgtggcacaatacactaaattaaatcaaggatgattccaccggatatcatttgttattcactattctttttctcctcttctagaaattctctgcaactagccaatttccttatattttcatttgggtgaacataataattgatttgagtagttagtcatttgtggcttacaattgctcttataacattgttaatcactcccatctttaattggtgatacatgaaagttttttatgaggagttcttaaactcatcttttttagtagttatattatataatttcggaccgtcatgatcttggtcaaacttcacgcgacacgtataattgaattttattattttttttggtgtaaactaaaaaaactcaattatacaccttatggaaattgcttaagatcgctaccacataatggtcttgaactaaacaagttttcatattataaatcggttaattttgtgaaaaatgatgcatttttgtgtttttttttaaaggcttttagtatcatttttttaacagcataatatttagaattatccttattaaaggtagagtttaatttctatactttattagcttaaagttttttatatggtaaatccattaaaaaccatgacgagtagatataatttgaaggtaattattataaatgtaaactaacttttcatatatcacaatttattctttatatatttgaattatattttagaggaataaaggaaataaacaaaatttaaaagtaaactcgatttgtttatacaataatacgacgacgtttaacaagaacggttttctagtctctgccacactaggaagacgaagcagcagcatcagtgttgaatctcgttttcccagcagaagaagaaagcaagggcacgcacatcttctcagctgtgagtgagaatttggagagtagaagaagacgcagctgattgtggagatgtcagtgcaagattacctggacaagcacatgctttcccgaaaactcgaagatgccgtcaatgccgccgttagggccaaaacctccgatcccgttctcttcatcgtatctctctacctctcatcatctcttttcattttttttcctgtttctctcatcggaatttctcagcatgcgtttttccggtgaccgcagtcgaatcacatgagaaaagcagtgcaatcggtcataacgaaaatcaaggcgaggcaggtcctcgatagcagaggaattccaaccgtcgaagtcgacttgcacactaataaaggcgtgttccgcgcttccgttcccagcggcaactccaccagcatgtaagccttttattattattatttatttatcaatcgctctcgttcaattatcgatttggtttgttattgattcgtttcaggtatgaagctgttgagttacgcgacggcgacaaaagagtgtatctcggaaatggcgtggctaaagctgttaaaaatatcaatgacaaaatatctgaggcgttgattggtatggatcctacgcttcagtcgcagattgatcaggccatgattgacctcgacaaaactgagaagaaggtaatttaacgtctctctctctgctatgaattcaatcaattggctgttgatttaccgtattacatattgttgtgttctatgctttgattattttacatttcaaaatgaatttggttagtgattaggaaaaatgctatgaaaaggttgaatagtcttatagtatggttttactgtctttttcattagtccaggatacataacttttagtttttcttagttatgtgatggatacaattgggatagtgcttgctaggttgctactcggaaacaactctaagtggtgaaggtcgtagttttccttctgcatctccatatattttcacttttctattttctctctcttcattttccatttcttttacaaagtgctcccttaggctagtaggagaatttgtttggctgttggaaatatgataaattcatacaagatatttggaagcattatttgcactttacttagtatgtgcatacttagtttccttttcagttttgaatgtttgcttgatgaaggcagtgtgtgtcattgattcttatatcatatacttgttgcgatcagatactagtgcatgcgtgttgaataattcatcttagcaatataggtctcccaatttttgtaagattatatatatatatatatatatatatatattttatcagttctgtttcggattttctctgcagggggaacttggagccaatgctatattagctgtgtccattgctgcttgtaaagctggtgctgcagaaaaggaggcatgactctttaacattaatatttttataagtttgattaacttttaatctggaaaataagtatatatgttcagtcatgatatcatgaaaataaagacaaaaacatacaggttccactttacaagcacattgctgacctgtctggaaaaaccagcccaacacttcctgttcctgcctttactgtcataagtggtggaaaacatgctgggagtaatctggccattcaggtataatttctgttgaagtttaatttcttagacattctcattagtgttttaataatcttacctccattagggatgtgttcctttccttcaaagaaactaatgaacagtgaaattaaatgacaaatgttcaattatttttgttgtaactaacacctgttcaattatttatggcataactttggcaatttattgttgtgtttgattctgttctttattttctgagcaaacataaacagatatagtttctttttaatctgtgtttcttctgcttcatagtgatttagactcttttaattatgaaacctttgttacataattcctattaggaaatcatgattctcccaattggagcaagcaaatttgaggaagcattgcgaatgggcactgagacctatcatcacttaaaggtggttttgctttatttcttctttttttatccaatcctattgcttttactttctgtctttagggattttttttctcctcataatttcactcattgcaatgttcccaaactagaaacatatcaagtttagttgcattgatttggttacattgtcgtttacctggcttacaatgatttagttcggtagatcctatgttattactactatagtcttcctttgttgttgcttactgttcctacgatgctggtatttggttttaattgatttgacaatccaatctgttgtttcccagcccatatatatgttttttgatcaatgatggattaaaaaatcctaataatcacttgctgatatcgtgtttaagctgatacatttatttattgttgatgacaaaagggcaggctgtcattacagaaaaatatggtgcacataactgtaatgttggtgaagatggtggctttgctccttatatctccaggcaagctttttattggatttctacagcttttgaaaattctttactgttaaatacaataacaaagcctttttccactttgtggggtcaattacgtggaaccaccgcaccacaaatttctgttaaatgaataatataaaaggggtaaaatgtctccattttagaagaaaggaaagaaaaacaaaaattatctccaaactactggttttactgctgtaatttctcttactgtctgttgtgatttcttggatacattgatatgatatctctgttcctttgaaatctatgataaatatgtgatgaaaagaatttcatttgtattttgcctcttaatctaacttgcactttcttttagccaacattttgaactgctgcatgttataattaccatgttttcttctacatggtaaatgcatgttatgaattatgattacatctttttttaaagattaataaaaccagctagtgtcctatgcacatcaatattttaaaattcaggtgaaatataaaactagaatctaagatgaagttataagcatgatatgaagaattaattccaaagaatatgggctgtaaatgaaaaagaagagagagtagattaatagattaagttaactttcaagagaatatattatcaaatttaatataaagggttggttgtattaattttatgtacttgcttttgcttattgttaatnnnnnnnnnnnnnnnnnnnnnnnnnnnnnnnnnnnnnnnnnnnnnnnnnnnnnnnnnnnnnnnnnnnnnnnnnnnnnnnnnnnnnnnnnnnnnnnnnnnnnnnnnnnnnnnnnnnnnnnnnnnnnnnnnnnnnnnnnnnnnnnnnnnnnnnnnnnnnnnnnnnnnnnntgactgtttaagtatcatcagctttagagaagccctggatcttgtgaaggaggccattagcagaactggttataatgagaaaataaagatagctcttgatgttgctgctacaaatttttgcataggtatttctaagtttctctcgcttgtgtacttttagattctcaagaagatggaatttggtgatacttgctctactattttgcttatagctattgtaatgagagtctttgttgcagcagtctatgctaactgttttactgcgtcatttatgaaaaatatgaaccattaattatcctttgctgtcatagcaaaataaaactagtctttctaagagatacaaaaatagcactcttatttgataatagtacttcaataatgactataaatacaaatgaccatcctcggccatggtaatatgtcatctttatattctatttaggggtgtcatttcagctttgtttctgaatctagggttagatttttaaaagccaataggatgagcatgatgagtgactgttatgaactttaatctgtagagcttgttatcaacttattgtcataatttatcattttaatgttttatttttaatattaatactagataattaatttatatggaaagtttctgcaaaatattataatatttcactgttgattggtttcttctttttctaatgctaagttgctaacagcccctaatacctttttctgtgatgcaccctgcctcacctcatgctgttaaaacccccttgtactttttgggcaccttttgcctttgaataattttaaccagtttctactgttgtgtatgtgctttttccctgatataggtaaaagatatgatctggacttccaatctcctcaaaagtctggacagaatttcaagtcagcagaggatatgatggagttgttcaaggaactatgctctggtaaaccagtttatcttagtattttcctgatgggggacattataaattatttagcctgtgctttgtctttactttggatttttctttttgaatttgtagaataccctattgtgtcaatagaagatccatttgacagggaagattgggaacatgtcaagcatatctcaagtcttgggatttgtcaggtattattttttaatcaattaatattttgtttgagttaatgtgaattcaatctctgtcctggttaacttgtgcagccaaagatggatgctatgaagtataccttatcattttggagattacatgatattttttaatgatagcaatggatatttttaatagaaaataataaccaactgattgttagtgtatcaatgccatattgactcattagcaggctatgtgaacaagggaggaaaaacaatatcatataaaattgttttgtcttttgtcacattattggggttgtgagcgttagaaggttatttgcatattaccaccgagatgttaagtttatatattggctactgattggaacttctgtttttacagtttcccttcattttgaatggttctgcaggtagttggggatgatctcttgatgtcaaatgcaaaacgcattgagagagcaataactgagtctgcttgtaatgcccttcttcttaaggtaacttgctgtttcttcaattaactttcaagtgtttattttgcctaatgacaaaatttaatcttatcgtgtttttatttttttatattattgttttttaataataaatagtaaacttagttgttcatggactggaagcaatcttgtttcagatctaagttgaggtgttggatatccacaaatatctttttcatgcaaatacaagatcgtaaattaaaaagctagtttatgtaaaagaaaaagaaatctaaacatagcttgcctgtaatttagttttgccactttttatttatttttataaatcatttgggagggtattttaaatatcctcctctgtactttttcttctgttttattgaagaaaatacactgaaaatgtggtgatttaccattgtaatctaggtcaaccaagttggaactgttacggaggtcattgaagtggtgaagctggcaaaggaagcgcattggggggtggtaacgtctcatagatgtggagaaactatagactctttcattgctgatttatctgttggccttgcttctggtgtaattaaagcaggcgctccttgcagaggagagcggctagaaaagtacaaccaggtctctttctgatttttatgctgatggttttactgcatgcattatggtcatgattcttgaatacttcaaaaaaaattatttaccaaacttattttgtgaactcaccaattcctctcccatgggaaggtggtggcagttttctatgataggttgtgtatttgtgatatcagtagtgtttaagtgatgattttataacctgtaattttggtcattaaagtttgtaaatatgctaatttgttctgtctttttttaatagcagtcgtactagtacctgagtctgtagatgttaatcctctttaggcttcgcaccctatgtggcttgatggcaatatctatgtatgattcttttaataataacatgcatattaaaagcaatagctgtgagtctcatgtagagatgaagttgatatttgtcgtgtatgtattctcgtttataaagtgaaacgaaggaaaagcataacagttaccatctgaattttgatagttacttcggattgaggaggagctcggagatcaagcagtttatgccagtgaagattggaggcaataagattgaatttttttttcacattggtctttgagatatgcttttcttatttaagtttgatacgtgtggttgaagttcatccctgtaccatattcatcaactgctgatgttctattgccattacttccaactttgatcgttttgtgctattgggctttggagaatgtttcaacgagtattcaacaatctgtacaagatagtgcggcctgtttatttgtctatattgttttaggggataaaaacttgcactaattcaatgctgaagttaaaattgttccgggcaagtgatatttgattatagttatccaattcttcgcattgcttatgttccagcgcacctccttttacagacctgacatatcattagatagattttatcatttttacctttttatttatttattctatacttattactttcttgtgcctttataatttaaattgatatgtgatgagcaatggagaaagggaggctatttggtttcctcgcattaatgttttcattttttttctctcccaatattatcttgacattttgtaatattttttcaataaggattaactcggtatttttgttctcttttagcataacagnnnnnnnnnnnnnnnnnnnnnnnnnnnnnnnnnnnnnnnnnnnnnnnnnnnnnnnnnnnnnnnnnnnnnnnnnnnnnnnnnnnnnnnnnnnnnnnnnnnnnnnnnnnnnnnnnnnnnnnnnnnnnnnnnnnnnnnnnnnnnnnnnnnnnnnnnnnnnnnnnnnnnnnnnnnnnnnnnnnnnnnnnnnnnnnnnnnnnnnnnnnnnnnnnnnnnnnnnnnnnnnnnnnnnnnnnnnnnnnnnnnnnnnnnnnnnnnnnnnnnnnnnnnnnnnnnnnnnnnnnnnnnnnnnnnnnnnnnnnnnnnnnnnnnnnnnnnnnnnnnnnnnnnnnnnnnnnnnnnnnnnnnnnnnnnnnnnnnnnnnnnnnnnnnnnnnnnnnnnnnnnnnnnnnnnnnnnnnnnnnnnnnnnnnnnnnnnnnnnnnnnnnnnnnnnnnnnnnnnnnnnnnnnnnnnnnnnnnnnnnnnnnnnnnnnnnnnnnnnnnnnnnnnnnnnnnnnnnnnnnnnnnnnnnnnnnnnnnnnnnnnnnnnnnnnnnnnnnnnnnnnnnnnnnnnnnnnnnnnnnnnnnnnnnnnnnnnnnnnnnnnnnnnnnnnnnnnnaaaaaaaactccaataataaggattaactcgctactttcgttctcttagcataacacagtgcagaaggccatgagatagtaccctgaaatttatggaagttggtaaacgtgcaaaccttacatcccattatcaacttcatctactaattacaccttttttaagtcctttcttcaccgatgaacagcttttgtatcctaaatattaattaccaaactagatgtgccaacactttttcatttttagcattaagttaaatttagtaaatggtaaggactaaaatagattactaagaaaatgtaaggaataccaaagtaacaaaaaatttagaattatacataattatatttacagaaacttaaaaacatgtttaagtttatgttacgaatgttgttgattacacttctctctttcatctcgatctttatggatgtaatgagatcaggacatttatgttcatagatgattttgttctagtttctatatgttcatgtgagatcatagagagtaatgattttgttctagttgcgtgttatctataacctatcttgtggttgttgaagagtaatgacacccattacccaacccatctaacatgcatggcaaagccagattggtaaaatcacccttttcagaatcaaaaccgcacaccaatgtaattgcaaaccaagggatggaatagctatcactttcagcaacctcggcgctcctccccttctattgtgcagcatttttcttcattcttaaaatttttgtacgaacactttggaaccgtgaactttatggaagtccatataggtttcaaacattaagtttcattttgaaaaaagtttttcttacaagagaaagattgatacgataaataatgcgatgtaataggatgaaagaaataaaataaaataaaaattattggtcaagtgttaaaaataaaaggttattaaaatatcatcacccttgagctactagttatactttttaaagttatttcttcactacacggtcagtttttataacctttgcaataattaacaaactacactgtgggtttgttatttgttttagatatactttatatttagttcagaattattaataagttgttgatctaaataattttggattcgattttcttaaataaaattaatggatattttacattaatatcaacagtcataaaaaataattatatatttattgataatttagtatctatattttttaaatgatcaattttgatttacaaatgttgtgataaagtaattcgaatactcaattacagtatcaaattaaaaaaaaattgtgattcggacacgggttggacactgctttaggaggaaaaaagaataagactacaattattatttaaaataaaatatcaaatattaaatatatgtttgttttaatgtttgggaggtcgttcagacaaaaataataaattgttatttctcacaaaaccacactttgtaatttgtgccaacggaaagttaataaaatacaaacatgtcctaagaaactagaaatacagatctattgcacaaaaccttattgcatgtgccttcgtatctatttttcgctttatctctgatgtgagatttggctctcgacttccattgcttcccagtggcttgtgagtttttatttcacacacccctatttccattgctttgtgattttgtgttatttctaatttcgtttcgggagttgggcttggtacaaatttctgtgaataatataaacttaatttagttgatatgtgcctagcatatgatgcttttcaagcttaattagatcgttaaatgcatcattttatatgataaatagcttccaattggtgtgaatgtaatttatgagcttcaatgaggtattttggtcaagattgaatgaatagcaggtgaatagctaaggaattatgcagagaagaagatctggcgaccatcaagcctatgtactatcgggagtacataggctagttctgaatgccacgccatcagcgtggatacccacgccatcagcgtgggttacaacctgtaaatgcaatttcctctggaacctggcgccatcagcgccaaaatccgcgccgtcagcgccacaggtcgcagagtctgcataatgagggcaaaacagagatttcactagctacactataaatacttgaagcctcagcattggagggacctttttgggacgaaaatcaacactaaaaggaggagaaagaaggcttgggaagcttggctagggtttgggtgtgaggggaagagggttcttccctcttcccttcctcttcttccttgtacatatcatcaagcatgcttctttttgttgtaccaaggccagccatgtttaggtttggttaatttccttttgtaattaggacaaatgttctatgtaactttcatttggaatggattgaatgttattgttcattaatgctatatgttattttattacactttacttgaatgtttccttcttttctctaaacttgatcaacctagttgagagcttagagctagggtttacaataggaatattggggctttagtcttggaaccaagtgtggtgacttgctaacatcacctaggaataggaatgggtgcttgcaatcttatagtgcatcgcttaatgcttaacctaataaaataccactaaggaattagggtatgaaaaagggttaaagggttaatgtcactaaggaattagggcttaactattaatggatgaggatgcatgattgagtagctagtgcagatgaatgttgcaatcaatccatgaagaatgctaggaatgttgaatgtgggttctctagttactttaggtgcgtttggtacaaccactacctaccttgtatataatgctctatgtttatgtttatgttacatttagcttttaatttactttgtccaacaacatttctctcatatcttttgtcatccaacctatagatacgatttatgatttaattggccaaacaatcctcgtgggacgataactcttcttatcactttattacttgagcgaccggtgcacttgccgagtacgcaacattagtccattaaaatcaagtgttaggtttatttaaatttgtgttactattctaaagaaaattttaaaaaaatgtagagataaataaaaataatatttaataaataattgaaaaaagtgtgtataaataaataatttgaaaaaatgaatagaattctttcttgaagtgtgtgaatttttttcttgatatttttagatttttctcttttcaaaacaaaaacatttctcatataataaaaattaattttctttcatatattgtcaccttcatttctctcaaatacttcctataaccttctccttttaacagtttctaacctttcccctcctgcacactgcaatcataatatcatatctataaagtaattgatttctttaacactgttataaatcatcacataagggagaatgaatgaaacagtaggtgaattgctcatattcttctgcgtgtaaattttgactatgattttgaatatctatgaaaaaaatccttaaaatcccatgaacataaaataatataaatattcttaaaaaaatattataaaataaggacaacttgataaatgtataaacaaaacgttagttttccacttctctgctcaagtatagaaatttgtttttaaaggtgggtttcacttagatttcttttatcttccactattttgcacaattcaaaagtgacaacaattgtaaaacactaaaacttgaagttgacaatctggtgccctttccatccatccgtccaaattcttacgaaacaaacgtaccattagttagatattatttatgattatgattactctgtttggcggtaagtggaaaagcacttataaactaaaactgaaaagtgctttacatatatactctttttcctaccacaaaggacatgaaagcacaaagtaaagcagtcccaacatcaaagctcgattcctgttaactacacaatatgctacatcaacaccagcaaacacagtcatgtcgtgtatttttacaaaatatacatccaataatgtgcaaaataacgtggtcagggaaaggaatgcaactacacaaaacgtaaaagagtaccatatatattcgttaacccacaaaatatattcctacaaccgaatttaaaatccataagagcacctaatattaaggtttaatttggttcaagcaaaagcgaagataacccttctcaccaatcgggtaatgaaccacaacaggcagatgcagctggttcgacataaagatagtgactgtattagacaacggcgttgccttggtgaaacagttcaaaaatgtcaatccaaaactcaagctcacagtctgaatcatctctatcacagtagcttcctcatcagcctgtatgcattaattgcataaacaaatacacacattctaatctcacagagagtaatataagcccaaattacttattgttacgttaaccctcatgaaagaatttggtgctagtgaacatgttaccttgtggatggaagtattgttcctgcggaatataattgaagtcccaatatctcctttgctgctaaaccccacaccctcttcgttaaccataacggaaactaaaatacagcaacacatatgaaaaaattaattaattgcaaagtcaattaattaaagaatgaagaagcagcaagaattagaaacatgcatgcaaaataaaatgatgaacgcaaagtaatgcattatgcatgcatgcaaaagagaaaaatatataaaggaacgaattaccggtgtccccaaaaatagagaggtcagtgcaaattcttgaaaactcagctgaaggcatcttaacataggcatcgtaaatcagatcctcgggaaaaacgcatacgggcttggtgtctatatccaccagattcatcataaaatgagatatcttggctcgcgctataacacacacaacaacacacgaatctttagaacagccctagcttacgttctatcttttcattcatcgagtaaagggaaatgcataaatcttaaactaacaagagagagaaggaaaacaaacgtactagggctttcgatgatgaagttggcgaagtggatgccatagtcggctttgatggtaatggtgtcatcgtcggcggcggaacgcaggatcttggccatgttgtttaggttgacgccgatggagatggtgcggtcgcagcagtagttcttgaaagcttcggagcggaggaagatatccaccacttccatgcgggtgggatctatggcttgcatggagaagccgatgtgggagaaattgaagtttgtatcgttcaccttcatctctcttatggcctcaaccatgttctttaggactgaaccttgcatgcgagcttccaccatcttctttcttcctttcttgttaatttctattttcaagcaacaataggacgagtttatttatactttaatttaatgtagtgcaacattctgaggccactccgcgggatttttctgtcacttcagttcccgtcattaccatcattttttttttacttaattgtatctttgatttcctaaatgtgattttaatcttgtgttccaattgcacaaatatggctttcaattatcttaattgtgcagttttagtccttctaattatatttagttttgtaaaacaaactacatttatttaaatattttacaattttgttaacattgcattggatcatgcatgataacttgcacttttaattttaatgcctcacgactacaatatcataagaaacaaaaaatgtaattaagttggacaataaatcatcaacatgatatcttatatataatatcaagttaacaatatttattgaatagacaatccatttgacaaggatgattggaaacatacaagtgtatatcttaagtcttggaatttgtaatattatttttctaatttttaatcaatgaatattttgtttagttaatgtgaattcaatctctgtccttgttaagttgtgcagccaaattgatcctatgaaatactagcaggacttttcatttttggggattacatgatatttttcaatgataacaatggaaatttttaattaaaaacaataataacaaactgatataaatgtatcaatgcgatatttttttatcttcactctcactttttttttattgaatttcctatattacttatgtagttatgtcccttcacaccctccattccctctcacccgtttctcttctctcccgttcgcactccctacccccttcccttcaatatttgtcattggtcgtcatttgttatttgataacaaaaaaaaaatacaataaaatgttaaattagtgtgctataaaatacactagtcctaaaaatatcaattaaatgtggattgattcgattttaaaaacactaaccaaaacctaattcaaatcaatctattatgaaataaatagtaaaaaaaatgaaacagtcagtttcattggcttttgtttcttttggatcgattttttatttttcttatttgattagatttaaacattcctactagacgtgtcacataggatggtatgtgaacaaacaagacttaaaaaggggaccaacttgaatgatgggttacagaggattatctcttgtttcagtaaatttaaggactacagcgaccatgtttaattgtttatcaaattcaagaactaaattgagagtttactcgtaaattttgaatgattcttaagataattataaaagtaattattataaagctctcaagaaaacaataagcacgggaaaaaatataaactaaacatttgcaaagaatgaaactttcaaagcagtaaggaaattgttgaaacttgaaagattatgccaagggctttacccaccctattaaagctcaataataataaacgtcaattgaaccatcacattagcttgggggaaattcttctgggcctcattatgaccacttaggctcaaataaaccgatcggtttcgggtcaaataggaagaactagaagattccacctctgaaaggcgcatgtctcagcaacacaaaacgagggtttcgctcgttataggacttgaccaatgtacactcccttcgttctatgaacccttgttgattctgaacttcattcgataaaacaaagtaccaagattcttacatatactggaaaaggttggaggagttttcacagcgctctgatctccgacctcctaggacccaagcaaaggattgacttcgctaacctcagctttcggtgataaaagttcccttcccttttctaaaatgcctgattggtcttaatcaactggatcgaccgaagcaatttcctctagacagaatgatggggctctctttagagacctattagtgattggacaacccctactggtcctatcgaaccagccaactcccaaaatgccacttcttcccgtcgcatccgtcttcaggacgatctagggcctttttttgttttggatttggaagacgggcgttgcgttcggttcgaaaggcatggttttcagtctgtctccagatagggccccccactagtccggctagctagtgagcggttctttcgggcggactgaaatttcgttttcgaataggactacttctttcttttctgtacaaaggttaaaactccctttccaaaatgaaaggaggtgttggctaggtgatttttttgggatgcgggaagaaatgcccataaacaaataaagcaaacacatttattcaatgctattaaacccaagaaaaattaatattaaataaacattcattatgttatttaacaccgagagagaaggagaaaaaatgtgtatatatatataataggatttatgatataataaaaagagaaaaataaaaaatcttcaaaaaatatttaaaataataaaatatttaggtatcattactctaaactcaattatcttatcacaattcatatattaatgcttttgattgcttgagaatccttcctttcacatattaagactcatataagtgtgaagtacgatatcatcatcacaatctcttaattaataatagatgctacaaatcaagagattcattttagaatcatctcttatgtctcatcatgcaaaaaacactagtatagcttaatgctagtacagtccgcatggataagctgcaaaattaaatatatgatataattgtatgtatttagttataattatgtagaacttagtaaatgagaataaaaaatgataagattggaatatataatatattttataaaataataatgtatatttagttcataagttcacaaaatcaaagtaatatcatttttgcaaaatttcactaaaaaaagtattaaataaaatttagagagattgatagaatataatgcacttatattaccattaatcaattcacaatagagtaaaattagattttagatatgggaactcaaatataattttgtggataacatcaaattatggtaatttgcaaaagactttcatctagaatcaatttttttgcactctctcttcatttgcacaatatcaaataagattcatctcctatgatgcgagaagttcacattaaatgataaccattaattaaaaaatcaatggagttacctgtgcatttttgtggacccctcactttaaatgaattattttcaataaatctatcaagctctttgcataaataataatatgaccaaaataataaacgataagaatacttaacatcttattatccacttaagtatgttacacatttatttcattttttgatcaactatcaatctagaatcacaatctaatgggaaaatctcacaaataacatacttacaatactatagaaaatagataattaaaacaaaaaaaattacataaacacaaaacacatccactactatagcttaataagaatcctatatagtttcatttgtttaggacaagaaactaaatatattaattaccattcggtaacgcatttatatacgaccattgcagcgaacctcttcagtaacttcgcttttcatcttggtctcgaccgaatcaagtggatctactgtttcaaaattatatatcacattatagaagcagaatggtcccatcccatctttagatgaacaatcgatgaaaacaataatgaaattccccataaaattccatctttggttacttttgataattcatttcacttttttcctagaaaatcacaacaacaacaaaaataagggtatcattaactgtttgatgagtttgatcttctgtgataacattgaattgcgagaagaatagtaattttaaaacatctattaattaacttttcaatttgacagtttgactaaaagattctgtttgtcgtgaatcttaaaatgcccaatatttagtagaagctttctattgatccaacgttgttgtggggtacattgtcaacaaaactcgtaatgattgtttgttatagctgaaacactgggtggccgttatttgattgcgatgggatatatatgttggcccatgtgagagaggaaatccttaaactaaaattgtataggccaaatattttaattaatgagatgttaaaaattcttcattatttatttctaaatttagtaaaaaaaatatttatttaaattatttttcatcattattttgactgtcattttgagctaacaactaacttatatatatatatatatatatatatatatatcaagctacaatgtgatttttataattcttcactggttcttaattttgtgagaaaaaaaaacatttatttcaattaattttacaatcattttacataaatttaatgaatactgaaatgaatgatatatatttgacaaattgtaaaactaactaacaaaaagattttgacatatcaaaaactaaaatgtccggctaactaatatataatgaactaataatttatttaacttttatattcggggaaaagtattagctgcaatgtcagataacatattcgagaatgaaccgcatcgtaataatcacttcaataaggttatacttccttcgttggatatgaattctaagactttttttataaaaaaaattataagatttttttctagtttttaaatgtagtaattatttttttatatatctttgcttccttattttttttcaaacattaataaaaaataattaaatagataaaaataagaaaaataattttaaaataatactacaaataattgataaactatttatttctaagaaacatgaatcagaattaattaaaaaacgatatagtatatatcacaactttgcatgtaagtcctgctaattaagcaaacatgaatttgaagactttcaaacacagcacttgaagtctctatataacctcagtttctagccatcaaataaactctagcctttacaacagagccatttccaagcttaaaaccaggactaactgagaaaccaacaatgtttccaggaggcaccctcccaccagcaaatttcagcacactctccatgtaacgcgggtggaactcagctccactacttgcctcaaacttacttggcgcaggatcaaacgagaacgcaaccagatgaagcaaccacacacccttcgccaccaccaaaaactctttgtaaaaccgagtccttggatggttcccttcagagactagactgtgctgctccaaatcaccaaacagtgactcctccatcttggggtgcacaatggaaaggtacttgttggagcagaatttcccaaaattacacgttggtaaaactcctccaaggagctcataagggtccatggacttcatgtggcagtattggctgaagcaatcgcggcgaaactgagcagggttgaggagggaggagagggtgctattatccatgtagaaactttcgtgatcgaatccttggaacattttcttgtagatgtatgattcaagggcgtacttggcatgaagagttgagaccgtggtggaggtggcggttactgaacaagtattattattattattatagtatttgtcggtggtggtggcagaagctgctttcatggaacgaactgcggcagccatgtcccattgtgcgtcgtgcatgagcgacaagagtagagatgtgaaggactttgatgcttcctttacttgcgccattgttgcttccaagagttctggggatggtgctgctacaaaccctgccgctatttcatgacaccaatgtcaaaaagttgcaattggtataactaagatgctcttcttcttttttttctagacgttgaacaagaaagttaacatataaaccaattgaattttctggctaaccaaacacattttttttcatatatatatatatatatatatatatatatacataagaaaaatgtttttttacaataaattgtataacaaatttacaattaagaaaaaaaagagaaaaatataaaatataatgaataaataattaagtgttattgtataaattataagaataatataaatcacttaagaaactctactaattaaaatgagtagattgctcttcattaattattgaaactataccataaaaaaatattacacgattctccctccctctctctctctctctctctctctctttatatatatatatatgtcaatcttcatttgatacacaactgannnnnnnnnnnnnnnnnnnnnnnnnnnnnnnnnnnnnnnnnnnnnnnnnnnnnnnnnnnnnnnnnnnnnnnnnnnnnnnnnnnnnnnnnnnnnnnnnnnnnnnnnnnnnnnnnnnnnnnnnnnnnnnnnnnnnnnnnnnnnnnnnnnnnnnnnnnnnnnnnnnnnnnnnnnnnnnnnnnnnnnnnnnnnnnnnnnnnnnnnnnnnnnnnnnnnnnnnnnnnnnnnnnnnnnnnnnnnnnnnnnnnnnnnnnnnnnnnnnnnnnnnnnnnnnnnnnnnnnnnnnnnnnnnnnnnnnnnnnnnnnnnnnnnnnnnnnnnnnnnnnnnnnnnnnnnnnnnnaaaaaatttattataaacatataaaaaaaaaaaaaaaaactcgactatatatgtgtcttgtatgaattgacccatctagtcattttccgcctagctatgtcaatttttaagtggatcggaagtaactgagattttaatttgaaaagtgaactatgatgtattaatttgttttaccttgaatatgagtattggaagcaagctttgtcttagtgtaaggctgaggcctccgagctttgtctttaagattctgaagttgcaaatccttggccttcacttccttcttcagctctttcatgagtgtctcgtacggtgcatgccctcctcctctccgtctactcttgccttcttcaacacttctcacactcccatggaacctgtccctcaacagaccaagcttcttcagctgtgccaccactgccacgtcagccttcctcaagctctgcgggtcccacgggcagtgtgcttcctgcaagctcacgtacgcactcttcattgccgataccgcttcgaacacctcctccattaacgccctcatcttcttcaacttcttttcctctcttgaaaccttcaaatccatcaccattttttcttcaccgtagtaaccttcttcgctggcatcttcgtcttcgtgtctgtttcctaatgagccgctgtggtactcctcttccctgtcgccggcgtcagacctgtcattggcgaatgggtggaggaagcaggaggtggtgaccctttggattagatcggagaaattcgacacctttctggtcattgcttattgctacgtacgtgtttgtgcgaaagagaaaagaggaaacataagaatgagaaaaaagatggtggcagcagaggtggaccacagagtggggtcagtgagttaataatgctaaactaatcaaacaatggatgctccaatctaacaattaagaacctgtcttttcacatgtgatttggtgttcataaatacggactttgtttgcacttatttgttatttttagaaattaagatatttataaatacggactttgtttaaattttcatatatgtacttatattctgctaagaattaatcatctcatacatagtaaaatatttgtttatttctaattacgataactttgtattttttttttaatttcgatatgtataatattttgatttgtttttttataattcttgaaatacttacatatatcaaaatgtaacaatatataaacttacaaagaataaaaataaataaaatattagttatcttcttattattacccaatgtttttttaaaacatttttcgccaatgttttcttcttattacccatccatgtgaaaaaaagtagtagttatctttcaatgcctacttctcctatgtttttagggaagtgcatttgaatgatttgaccatgtcatgttgttgctttcctcgtgcgttcacacaatttgcgcctcttgaacacttgattgaatcataacctaattttaatggatcctaactttgttctaacaattctaagtttgctattaactgtaagctatcaatagtcaacggctaaccgtcaaaaatcaacgataacccgtcatcaattgtcagttattaagtatcaagtataagttctcaactattggatattagatattggtcattaactaaagtggttgcctcaactcctattttgataagttaatccaagcctaaaaggaaatctgaggtggagcctttttaaaattaatataagtaaaaaaaatcaattagggacctcactaatgcataaagaaaaacacatcttagttactgctacactaaattaactaataataacaattggataaaaaaaatgttaacaacactctctttaatagtttttatctctaacattttctctatttttaactgaaaaatattagaaattataaattttagtaaatctcactgtttatttaatgaagttctatcttaatattttaatggattaatcttttacttttagactaaggatattcctaatttaaaaaaaaaaaaaatcttttttataaaataaaatgaaatatacatgggccttgttattgcccatcttttcccataagtaacccttttccctttgaaatgcaatagtaatattggactatttgagttaggtacgtaagcattacaaattgaacactgattctagagaatactttcactaaactttttttgacataaaaactttcaccaaacttaatttacacagtttagtaagaaaatatgtcccgcattcttctaattttttaagaaaactaataatgatatcttttgtaaaactactcctttcggtcacaaaattgatataaagttagactcaagcttagcatcacagattcactagaagtcattgttttcaccccttgttagctatgcctccattctgcttccaaaagttcgataataacgattttcgtatcatacagttgatgaccaacccttaacttgaaaacttcatgaaatcgtccttctagaggcgctacacaggtgaattgaacatgaaattgtattgaaagaaaggatttaatcaatgcactgatggcattcacgagcaagataccttagaaagaaaattggcacccatttttaataattaattaccaccctactatgattggtggcctttaaagaaagcaaagcaaattgaattgccaatccaaagttccaaacccataacacccgaaataccaaaaagaaaaaataaatgagaaatttttttacataaaaagaaaaaagagatgtaccaattcctccacctcaaaaaattatttagtagttaggaaatataatagtccccattaattcccatatcacataagtttaaaataataattgtttcatataaattaaaaaatctaaatatatattatatagaaatcgatcagaactatatataaatagatgttaatctcatagtatttaatatttctcctgtagcccccactagtcccctcaagtccgtgcttgaaagctacaacccgtataagctcgtgtatgtgagagaagtccattcctttccttgaagccgtgatacctatagtcactgcatggttcactctacatacgaaacttttaaagaaaaagtacaagaaaactaaggataattataatacaacaaactcatccactcatccagcatcagttaaatagatgccctgaactttgaggcgtttgttttatgtcattttcttctattaatttctagcaatacgaaattcatttttattaaaagattatgaaaagagattttgaagtatcttttatttgtagcaaagtcggtccagcatttttatcattgtcttataacgaggaaaaataaaataaaacagtatataattaccgagccttttcaagtgcaagcaaccccattttaaatggttttacttagtaaactgtagctacccacatatatttatttattgcaatgaatgtagctgaattgacaaacacaaattgaatttgttaaagaagatgtagatttaatttttgaaaaatacaattttaaggaagaggaaaaaacttcaaatataaggaagtttaaaactaaaaattaatataataaccagttcgaagctcatgagaatctcgagatccaatcaaataatgaagtaccctaattaagttaagttggttggaaaagaaatggattaacccaaaaacaaacgaatcattcaagaaagaagaaaatcttaaaaattgagaatgatatatacctagaactagatttagaatagagcaagacaaatgcatggggatgagatgtgaggcaagcaagattctgaacggtgctcattgaagcatgaaattacccaccctgccagcctgtccctttcatctccttcgaataaaagaacggttcaaattgtgaaatcccttcccctcggtcttaccccctataattccttccttccacttgcattgcattttcaattttgcatctctatcctacgaaaatgtcctttgtcgttttttcccccccaacgacagatttttttattttttatttttttaaataaattaatataatcatcaaccagggtatgtaatagtatctacactatacggctcataataatagctaacaccatttgcatattaacagtgtcacacaccaattctgaaccacacactcacttttttgtttctttcaactgagacactcaccagtaacaagtcacaacccacacacacagagttatggcatctatggcggctataggttctctgaatgttccacgttctgcttcttccccttcatcgtatgtgggaagaaaaagcgttccacgccgcctttcattctctgcatcacaactttgtggagacaagattcccacagattcagtttcattgccaccaaaaagatgtcgcaatccagtgattgttactcctaaagcagtttctgattcccaaaactcacaaacgtgccttgatcccgatgctagcagagtacgtttacctcctttcttcatttttttttgtctctgtctttgttccattgttactacataaaattactgagaaatttcaaatccccaatcatatgtttattagggtgtatttgtggatcaaattgtaaacagggttttttttttagatcacaatagtttgaattttgatcgtgtgatatttgaattggatgtggattggttctggttctgattctgattgcaatttaaaatgtttatagagtgtgcttggcattatacttggaggtggtgctgggactcggctttatccactcaccaagaagagggcaaagccagctgttcctcttggagctaactataggctaattgatattcctgttagcaactgcttgaatagcaatgtcaacaagatctatgttctcactcaattcaattctgcgtcgttaaaccgacacctttctcgtgcttatgcaagcaacatgggtggctacaaaaatgagggatttgttgaggttcttgctgctcagcagagtcctgagaatcctaattggttccaggtaatgacagcactgccttgactctaaattttggtaccttgcgatgatgacttttgttgtcccttgatttgatgttttaacaaacttggtgtgatcattgcagggtactgcagatgctgtgaggcagtatttgtggctttttgaagagcacaatgttttggaattcttggttctggctggtgaccatttgtatcgaatggattacgagaaatttatccaagcgcatagggaaactgatgctgatatcactgtggctgcattgccaatggatgaagctcgtgccactgcatttggtctgatgaagattgacgaagaggggcgtataattgaatttgctgaaaagccaaaaggagaacagttgaaagccatgaaggtaagcccgtataagatgtattatatgttgttatttatctggaaattattacctgaacaattgcttaaaaatgccagtcatttttctttactaggttgatactacaattttgggtcttgatgacgagagagcaaaggaaatgccttatattgctagcatgggtatatatgttgttagcaaaaatgtgatgttagacctgctccgtgagaagtttcctggtgcaaatgactttgggagtgaagtcattcctggtgctacttctattggaatgagagtatgtgttccttccggttgtttaatattacaaaaactttcctgttattttcttgcatggtaaatttagcatgcaattttttgagaatattgtacggcatgtttgtgtacattcacaggtgcaagcttacttgtatgatggctactgggaagacattggtacaatcgaggctttctataatgcaaatctgggaatcaccaaaaagcctgtgcctgacttcaggtaaattatataggctatttgatatatctatcatattgacaaatgtatttcaatgatagtgttttgtggttctgatgtttatgtgttcatgcgttttggtatattggtggcagtttctatgaccgttcatctccaatctacacccaaccacgatatttgcctccctctaagatgcttgatgctgatgtcactgatagtgttattggtgaaggatgtgtgattaaggtaagcatttcagaaccttcacattctactgatctgctctatacatgagatttatacaattcttaacaaagatgtcaaatataatgagaataatttatttataggaaactaaccttgtattccatactttcttccatagaactgcaaaattcaccattctgtggttgggctgcgatcttgcatatcagaaggtgcaattattgaagacacgttattaatgggggcagattattacgaggtaataatgtggctaaataatttgtgctcagttacacctagtatttccaagttttaatagccaacaaggtttcacatgtcaaagtggttgaaacacttggatattcaatttatcgattgtgagtttgcaattgcatgtgaataagattaataggattggctttagtttgactagcagttctaactgcaatattggttttctgattgttgtgttccagacggaggctgataagaggtttctggctgctaaaggcagtgttccaatcggtataggcaggaactctcatatcaaaagggcaattatcgacaagaatgctcgaattggggaaaatgtcaaggttataacatcttctattatatacaattttgttccttgttttacattctaagccattttttcccaagacaacaggtgaggcgtagtagcttaggtgattttggtattgttttgtgaatcaaaattggagtttcacctcaataacctacacagttaaggttgatggttattgaagtcaaattttaattatgattgaagatcagtatcaaaaccacttaagaaaccatctcttttatatattaacattcattgacaagttgttggttatgtcaataattgataatttaagtaatgattgcatatttaattataaaatttgtgtgattttctttctatttaattaaagatcatgtaagatttgtaattaaatgtgcaatctaaatcattaaatttatctgatgattgtggttaaatattctcatttctcacaatgatacaataattaagactttttttaagtggtcatgtgacactaactaacttataattttgaccatttatatttggttttatggttgaaatttatagatctgatttctcagtaaaaaatagttttcatttgatatgtctcctatatgtttgtgtggacatatcaattgagaaaataataaatattgacccttagattttatcatgaatgatcatgattaaaatatataagtcatgcgtttttttttttttttttaaaaaannnnnnnnnnnnnnnnnnnnnnnnnnnnnnnnnnnnnnnnnnnnnnnnnnnnnnnnnnnnnnnnnnnnnnnnnnnnnnnnnnnnnnnnnnnnnnnnnnnnnnnnnnnnnnnnnnnnnnnnnnnnnnnnnnnnnnnnnnnnnnnnnnnnnnnnnnnnnnnnnnnnnnnnnnnnnnnnnnnnnnnnnnnnnnnnnnnnnnnnnnnnnnnnnnnnnnnnnnnnnnntttaaaaaaatcatgtaactattttaagtaataatctatcctcaaaaaacttttaatctcgatcatgagaatgatcactcttatacaattgtatgacttggatttcctcttcattgggataaaaatggctttctcactaaatatatcaacttttttttcatactgtgttgccatactttgttttcattcatgtgacatgttacgagatatttaaaatctaatctatggtttgtttccaattctcagattattaacagtgacaatgtccaagaagctgcaagggaaacagatgggtatttcataaaaagtgggattgtcacagtaatcaaggatgctttaattcctagtggaacagtcatctaaacaccacaccaccaccccaaaaaatttcttgtaccccaaatcctaatggtgactgcgaagctcattaccaccgcaggagagtttatcaagctctgcttccacgtctaagataggcttttgtgtttcatgatatatatatttttgggcagtggcttgtaaataatagcggaagagaaggcccgctatgagcaatcacgctgtaaagttcgttaatcaattcaataaaagtttctttatttcgtactaacaatactatacacgcatgctcttttatggtactatattgcaagggtgaccaagtttggttggacaaatttcagctaaaatggttggcagaaacaaaaatgcaaataatgactagagcgactaaaagactatattccgctatgttatttgggacgtcctcataatcaaggatggaacttacctcagagcaaggtagcctccatcaaggttttatgatctaaaatgattgaaatattactataatactatttataagtaaacataatatgaattgccatgttaaaagtagaatttaaattatattgtgagaaggaatttaaggaagcgttaccaagatattgaaaaatcttctatcaaggaaacagcatttctgtacggcccaattcggtgatccaatatccccttccaacaatcattcgccattgggtgttactattgacccaacaaaattgtacttggcccctatcagacaagcacaattatcaaattacccttttctacaccaccttacattcatgttgccaagtattttattttcattttcgtagtcaaacgaaatcatgattccgttgtgaaatttcgcacagtggaatcacaattttgttatttttggtattgttgatgcacaataaaatcttgattttattatgcgaaatttcgcattgtacatttttttcctctgaatgtacatttctcttttttaggaaaaaaatcaaaaataaattatgatttcattgtacaacggaatcacgctttcatagtattgtcatattttaacctctccttgcacaatgaaatcacgattttattgtatatttttcctctccctgaaaagcattacattatcatgtttccactgcacaaaagggtgtgtgaattttttacacattcgaatcacgaaaccgttatgcttttatgtaatagaatcctgattttgttgtgcaaaaaattcacactcgttttgtgcaacagaaacacaatgccataatgctttttagggagggataatattggaattttttgggattgtaagggagggcaataacaagaaacaaagtaatagttataaataaaatccgttctagttattttgttacaaataaaaaaaaatgatggagctttgtgaatatccgttatctaattttaattgaaattaatatttatgtacattgcatagaataaatatttattttatataaataaaatttaaataaataaatatttttaaatatataaatgatattatacttaaaatcagtagtaaataatttttttaacatatatattatattttagatttaggatgagtaatttatattatgatatagtgctattttaattgttgataatttaaaaaatattcaaattcatgttagaactaaatatatcaaaattgatagattgaaagaggtaaaaaattaagttaaacattcatttaatattaaagaataacatgatatatcatatgttagaaatatatttaatttttaagacaaaaaaattatatttaaaattgatttatgatattcatttgtaacttattaaaccattcagttgttttaaaaacataagagaatatatcatatgnnnnnnnnnnnnnnnnnnnnnnnnnnnnnnnnnnnnnnnnnnnnnnnnnnnnnnnnnnnnnnnnnnnnnnnnnnnnnnnnnnnnnnnnnnnnnnnnnnnnnnnnnnnnnnnnnnnnnnnnnnnnnnnnnnnnnnnnnnnnnnnnnnnnnnnnnnnnnnnnnnnnnnnnnnnnnnnnnnnnnnnnnnnnnnnnnnnnnnnnnnnnnnnnnnnnnnnnnnnnnnnnnnnnnnnnnnnnnnnnnnnnnnnnnnnnnnnnnnnnnnnnnnnnnnnnnnnnnnnnnnnnnnnnnnnnnnnnnnnnnnnnnnnnnnnnnnnnnnnnnnnnnnnnnnnnnnnnnnnnnnnnnnnnnnnnnnnnnnnaatggttaagaaatgaacaattgatcttaaaaagaaaaaaatgtaaataataattttggtctctggacatatatattggtgataatttaatcattaaaagaacacaaaatttaatataatctttaaatgtgtaaaaggtgtgaaccttacatttttagtataacttaatgataaattaatcattaaattttataatttaatattaaatttattcttgaaaaatacaacttattattaaacttagtttttatatcattaacattgaatatttattaaaagataataaacacttaaatattaataaattatatttatttactgatatgaaaattgcaagtattaaaatgtagaagcaaccgaagactctgtgacggaccattttttttggcgaccgaaatactaagtattagtaaatcaaaatcagttgtatagcgacttgggttttagcaaccggaatgttcggtctctgaatgccaagaaaattagcgaccgattcgctacttatatagcgattgatttttggatcgctaacagggttttttgtgtgtgtatatatgttaaatgcttgaatgtttaatttattatctcatctgagacttataattaaaaatatattttttaatatatatatatatatatatatatgtctaatattataaaatttacttattgtctattgtgaaacctttgaaggattaataaatttaatagttatttcctttatttattccatatatcatataataatttttttatttattaactgtatatctaaacatgcaatattgtaagtttttattatacggtgaggttgtttaaacttattattaaaataaatgtttattttaataaaataagttatttttattgtacttgtctaaattatttttactttaaaacaaaacaaattttatgtatttattttaaagttttaacaaatgtgtcttacataattttaaattttttgacccgtaagaattgataatgtataggatttacaataattcatgtatcctagtaattcatctcatgctactcaatcatcatctcaacaatagtcggtataagcataatttttaatttatgattaaaaatgttatataatgttaaaaaattataggtacgtttaattaaaatcatgaatacgtacttttttaggttcagtgaccgctctaaacctttgacccatttgacttcgccttctctctgtgtatggactgcaatacggtatctgtgttggtctgttgtctgttctgattttgaatgttcattgtgtatgtaaaagttgtacttggtgtacctcactctgtaacatgaattgaattgaatagtataaacaatttatgtaactgtcattttttttctcttgtcattcgaacgaggagtacgataaatttggctccgaattattactttcttgttaagtacaaagtttatatagtaactttttagaagccaaacagtactatctttatttgttttgttagttgaaactaaaaaactaatcagtaataactaaaacaatattatgtttttcttgttttattcttttacaattttacaatgggataccttttttaaaaaataaatacgtgtttggttccactttccagatccatgttcggagcaaaatcacattaaaagtgatgcaaaagtaactattaattatgttagggattaacgctttgcaatttttaatgtttttcaaaaacactataagtccaaaatttttaatgtgaaattataatttaaattaatttaatatattttagtagcttagaattaattttatcaaaattaatcttacttaattttataacaaacagtcccaaattgacgaatacatcgtgacaaaataaacagtgtgttctttacatatataccatgtagaagttgtagtacgtactccgatatcataagtattaaaatcttagctgtgctaacacggatccaaccaacaaaaaaatatatatatatacttccactaaattgacaaatacattgatgacaaaataaaagagtgctgtttacgtaacatatagaaagtcatagtacgccaatattcttgttttagctatgctactatcactatatgacaaaaacttatcattgtgggtagaaaatatgaaaatgactctgaacatatgaaagcatttgacaattttatattaatacacaaaggaaaaagtaaatcttattatttcgtatttacaaataatactttaatggtcattttagtagggaagaataaagaaaaagaaagagaaaactttaataagcctcatactttcaccacgttactttaaattgctaattagacagttttaaactaattgattcatacattttatgattaacagtaagataaatattaatcagtatcttaaaaatataagttaaagaattattttatttttattaaaatacataaaattatattattgataacaaatactctgtcattttaattctttaactatattttgaagacattggttagtaaaagtgttttaagaatttttcattatttgtttatgaaaaaaaaataaaaaaaaagagtagtagtatgaatgagagacagaagctgacagtgctactactgctctctggtgcctagtctctcatcctgctattgactgtgacattctgccatagcttcccagccagccctgctgtgctgtgctgtgccttctgcttggcttggctggctccatgttcgatgttcttgttctgtttccgcatgtgattaagaatttaagacctcaccagaatctaatctaatcttgccgtgtcttctgctcttttttcttcatccctctgatctcatcaccattctttctttctttcttccgtattgcctctcctctcagctctcaccttgcattgcatctttttagacactccccaccactcacaagtcacaacactacaccaccaaccaaccgtcttaagatttttcactactacacctgtacaacaactgggaatctgggatattgtatttattatgtagtaataaatttatcacattcaccttaataaaattggattcagatcacttatatcaaatatgatgtaaatcaataattcgctaatcagagtggttttggagtcatattaaattcaatttttttttaaataaaatcttgaatttaaattttatgaataacaaacgtgattaaaaaaattactgaaagtaatcaatcattaataaaacttataaatactctacattaatatcatagtaaaaataatcaaatacgatgtaggaaccttatataaaatatgatgagattaagattcattttaaaatctcattttcaataaaaggtataattattctattagaaaaaaaaaagttgataaacaattaagnnnnnnnnnnnnnnnnnnnnnnnnnnnnnnnnnnnnnnnnnnnnnnnnnnnnnnnnnnnnnnnnnnnnnnnnnnnnnnnnnnnnnnnnnnnnnnnnnnnnnnnnnnnnnnnnnnnnnnnnnnnnnnnnnnnnnnnnnnnnnnnnnnnnnnnnnnnnnnnnnnnnnnnnnnnnnnnnnnnnnnnnnnnnnnnnnnnnnnnnnnnnnnnnnnnnnnnnnnnnnnnnnnnnnnnnnnnnnnnnnnnnnnnnnnnnnnnnnnnnnnnnnnnnnnnnnnnnnnnnnnnnnnnnnnnnnnnnnnnnnnnnnnnnnnnnnnnnnnnnnnnnnngcggttgtaggtgctcgttttttagttttcaaatttaaatttgaaaataaaatctatttgggtaaaaaaagagagtgaaaatgaatttaaaaaaaaaaaatctaattttaaccttttaatattatcgcatcttcttcgatactttggttcacacctctccacctcctgcaagtattcaatttaacataaaggtgacaaaatagactcaaacaattgactcggccttaatccacatgttgaaaaatataagattcaataatccgaataacataagtttctagtgtgttttcatctcattttagaaatttaatttaaattttgactttttaactcaacttgttataaattatgatccagatcaagtatgtaaacgacttaactcgaagcacactcagtgaattgtagccttgaactttaatcttgagcacaagataaatttaatttttttagcctaatatgatcatggaaccatttgggcttaacctaaaaaaaactgatgcaaattggtatttcacaaaactttgacattattttgcaaacgttgaatcagggtagactttttggtttgactccatgtagtcacatttacaattcacctaagtcatatctaacttgatttcgattaatgtaatagattgatctttaacggtgtgtttggttggggagaaagaatgaaaaagaataaataagaagaataaataagagaaatagataaaaataaatcttcttattattattatttggtttcataaagagaacaaaaaatattaataaaataatttgtggtgacaagagtgacaaattatcctctcttttttgttttgtctacatgtggtcgtagaaaaagagcaacgcacagaacgagacaattttttttatatttcttatcacattagcgaagagagtttttggatgagacccacaacaattataaaaatttcttcactatttttggcctcgttttcttaaaatttgaattgaatataagttttattttatctgatcctgtatagcccacaacttacatcaaaatgtgaattttgataaaaatttgaagagatgttttatttgaattggtagttggattaaaactgagcacactatatttttagatgaaaattgaatttgatctttataattaaaaaaaatgtgaataacatggttaaaaaatatagatagatagatatattattattatggatagttgtttcccgcatggaactcctgtgtggctatgaaagctgctcacgagatgcatttcagtggtcaagactcgagtgacatattttgattattttcaaatgaaagaacgatttgatgggtacgtaaaaagaaaaatacttttcacacatgactgcacttgcctctatcaatatcgtactttattcaacagaataaactttagatacagaaaaaactcgtcgcatatgagagtaaaataaaagggtaattatatttatatttcttttaacctgtttcaaaaaataaaataactgcaacaaaactattttgtcagagggaggcaaaggtaaaataaatctttattcatctctttaaaaagaaataaatgtaattttttaagtatttccaaaattcaatttctttcctagaatacattttcttaaaatttgtatttgtaataacaaacaaatatattaattaaatttaaaataaattacatttaatttaattttaaaataattacttattttaaaaaaattaaaaaaaaattgaatctaggtaaatattnnnnnnnnnnaaaaaaatccgtaaaattaagtaagggtcagatattaagtaaatataagatggtatgtataagtatgtgtaggtagtgttgttctgtataatggttgaaaacaatatatttaaaagtaaaagaattatatccaaactcgtacatcaattagagtaagattgtttatgtttaaccaacaatcttaatttttattacatgtttgcttatgcatttggagcaatgagattcatgtccaaaaggaaacaagaaaaagaaactttcacttaagtacgccttcaacatggagagacaacatgaacttgtgttagaaaatgagtttcaagtacatactaagagcatgtttggttcttcagtgggcaacctcaaacatgcttttagagcacaaaactcagtttgaatagatgtttggaaacccctaaaaacaattttttcacttgagtttgactccaatctacgttcatctcaaaagcaagtgatgccatgcttttgcttcttcaatttccgttagggatctttatgaaatttaacttccaattttaaccctctctttttcagtcatctttcattattgttccttcattctcttgtttagtctgtatatgcatataagtttggtgtgcgtgtgcgcaattttaaatgttgcagattctaatcagcatcaatataaagctgttacacgaaaaatacccaaccatcaacacaaaattactaaatgcaacctttattccattagttttttagagttttttttactgaaannnnnnnnnnnnnnnnnnnnnnnnnnnnnnnnnnnnnnnnnnnnnnnnnnnnnnnnnnnnnnnnnnnnnnnnnnnnnnnnnnnnnnnnnnnnnnnnnnnnnnnnnnnnnnnnnnnnnnnnnnctgaaaacaatattatatttttaataaaaaatttatcaaaaaaacttcttacttatatctaaacagacccataatatgaaaccaaaaatctctatcattaccaaaaaaataaaatctctgttagtcttattatttattaatgaagttatttaatattatattaatatttttcagtgatgtattgatgattttatataatatattactagttctcatttgataatacattatgaattttgtacttcatacccttttaagtaattacacatttaaaaatacttttgattattatgtaaataagtttcatttcaccaaacatacttttaagcaaagaaatacctaaacattaatctcattgtacaaaatcatctttttttatttttttataacaaacttaagtttttaacatatttttattcaaacttaagttcacgagctttaatccaaatacatactaagtttttgacatacaactatgttacatgtttataagaagagtttattgcatataataatgatatatgatttgaacataattatctttcagcataaaaaatatatttagtataaaaaataaaataaatagttatgaaacattggaaagttttgaagtgaggatttcatataaattcattttgttttaaaatacggactcataatataaattgtatttaaacttaaagactaaaaagaaaagaaacaaaatgtaattttatgagttgtgacacgagaaaagaatgaacgtgaaggggggcaagagctgcgctgtttggaggtatttaggatgagatatttatggctgacccttcacccaagataatagagagaatggaatttcaatttcccattttaattttgttttttctcttgttgatgtggtattggtttgggtttcttcaagatttatgcaaataaaatttgtttaaacttttaaaaaataacttaaaaataaatctttttttataaatacttttttaagaagtaaatcttaaaataaacaaaaaattacctttttaagcagaaataatttaaacaaatatattattttttttgttaaaataaatatttattttaacaaataactttaaacaaactggtgataaaattgttgagggatgactttctaatatacttccttggtcactatctttattttccgttgtgtaactttgtgttttatgggttttattcaattgaatacgtagaactagaatataaaattagaaaatcaattggatatacctattcttgttttcttttgaatttatatagtacttaaaaattctaatttttaaatatgaggtttattgatgaatgatatttgaaaaattaggtgttcaccaccattcttttgagatgaaattttcgaatggaatattttcgcacgcaggtcaagcttggatggagtatctataagaactttgaggccaggatacaaaaagattataaagaatagagggagtactccaaactcttgaggtaaaatgatccgtgaaagacaaatggaaccttagtgttggaactataaattctttttctccttcaatagaaatttcagggggataaagagcagaggataaagatgttattctattcaaaagcttcaaagaataaaaggtaaaggtgataggattagaatcttgacttcacgaagattttctaatgatgtaaaagtgaagagactaggtccaataacggacttgaataagtaaaaaggtccaagacttttttctttctaaaggttataatttatatatatgtacacattctattgaaacctcattctgatcaatataagtaaataaggtacagaaaaaattaggagcattacagtaaatcaggaaaccccagttcaatatgtccgagcacttacactcaagaaaactcaaaacaaatggagagagtttcaaagttattgatcttgtcgctgttatgcatgtgcttcgaacatcaaaacctgaaaacccgaaaaaatttccaataaaacaaattgaaacattcattggaagatataaaattttccccccaatagattctatactctagatagtcgattgtgaacggataataattattgtaaatcatatgtactggtcataatagtggcacaaaaatgagggacagtaaattcacgctcacttttgtcttagcccttattggtctgaccatccaagattttctctgttggaaacaattaaaaggaaaaaggccacgttcactagtgttgtgctttccttcttgaatgatcgcagtgcaaaagttaattggaattttcgtaatgaaagacggtcaagtgtggaaagcaaggctatagttagatattgcactctattaccatatgaattgtatgagaattgatcgttattaaacatttcacttaaaattttaagtatgatgctaataatttaagattggcattaagatcctacattggagataatataagaaattaacttctctcaataaatttatttgataaacaaacttaagattaaattcctaatcacatatttaataaataaggttatatgttaattatattataataactagtttttttttacaagaaaaaaagaagaaaaggccgaaccaaatttaatttaattttcttattattaaaaaaaatagatttttttaattaagtcttttattttttaaaatttattagctcatgatcgtgaagatcagctcaagttagtcgcattgaatcttcccaccgaaagtgggggaataagtgtcgaatctcacctccccttggtacaactaaattccgacccagtgttccatatatgaaaaaaatatattttataaaaaagtgaataaattttagaaagagaaatgattatcgtttgctactagcagtattttttaacactctctctatagctcattggtcttctctttcctaaacaaatgaacgcaaaagctaaataggcttgtaagttaaggttttattattattaatacaaaggtgtttcttttaaattctgcctcaaacaccggcgacaattttgtaatacaatcatgctctttatcaattgaactgaatttacttgtagattttatagtagtgataaaattctataattgtattttatttggataattttttcataaatacttaaaagataaaaaataaattaaataagtttattctataagttaaaaatagtttatataaaaagtttatctcaagataaaatgaaaaaaaaattcatttaacttttcaaaaagttgattttattataagctaattttaacctaaaagagaaacttgtcttctaaaaaataattttttatacataaattaatttaaacttataagaaaaatactttatttcattttttatttattttttgttacaggtatggggtgacaaaatagatttgactattagatagtccattgaacctactttcttagatgggttgagaaaacggtatcaacccatcaatctgttttggcttggcaaatgtgtttagaaattagtattatgtcttaggacatcattttattttatattctttagtttttataaataaaaaaaatatttttgcgagtccatcagctaagccacccttaagccgagcaagctgtatttttcgaaccgtatattaaaaataagccaatccattctagcccatttttggcagattaatgaccaagcaaactaaaatggcccgagttgtcattttatcatccttacttataaatatttattgtttataaaaaaattgattggagattaaaaaaaatgacaagttcttagttttaataaaggctatatgattaacaaaaactaagtatggttgtttttttagaggagtatgattgtgttgctaagtgtgaacaagaaaagaaaagaaaacaaataatagtagaacagttccattcattattattatttatacatacatggctaaaaccactttcatgcaagtgggatctttcacatgataatttaatcataaagaatttaaaaataagttaatctagacacatgccaacttttgtttgaaaaacaataataaattccaccaatcgaaaagtgagcttaaaaacaataaactaatttcacgaatcgaaaatgcacttgaagacaaagtagaagatcaagaaaaagaaataaatgtagagaagagggagagtttgaggaggaggaccacccccaccacgttgcatttgaaaaacacctgaagaccatggcaccagttgagttgctatagctggattgaaaaaccaacccacagccgtcctcgcagtgcggaaacatctccagaaaccacaaatatcataaatgtaaaaagcatagtatagtattaataatatattattactattattatattgttattaataacgatatgattattttattgaagagtagaacaaatttgagggagaaaggtgtatggtgtatgcagaggtttggttttaaagtggtagctaggtatagagatttagagatacacaagacatagacatagtatgatagtataaggaagaattcccagacacctcctccttttgggtccctcactttgtgtccttatctccaacctttttgtccttgttccctttccggcctggtctggtcctccttccccacttttatagcctccacacttcactcacacactcatgtcttctacttcttcttcttcttcttcatcatcatcatcatcaacttcttcttcaaccccatatgacgctgttgcccctgatatccctggccctagtacgaggagaaccacccgtagtggtcaatttgaagcttcttcctcctcctctcagcgtcagcgtgctatgaatgaggtcttgcctgagccttttcttgaagctttggccacccaacttgcccttgatgctgccaactacaatggtcgtctttctgctgcttctgcccttgccattttatttcaggtaggtacttttctttcttctttgaaatacaagtattattgaagtctcacgagtaggaatgtaaaggttgaataccaccttaatatatatcccccttaattaatttctttagccccatttaacttttttgcttgctatgagaggagttgttaagaaagataagtttttgatgattgctcatattggttggttgtgtttgccttacttaatctgatgatggattcttagtttgcttaaaatgaatatttgtagaatcttcagcatgcgtaacagatagctttttcagttccgaaactggacaaaatattggtcaagtcagacgtgaacctagcattgcaatctgcagatgctgattcttttttattttattttaataataatatcgacattatggatttaacttaattaataatattatatgtatatatcatatccgtttcttttattttttcggatttttttttccttttgtgtgtattgtttaaactttagagaggcatacattattcaactcagtgtataaggggagatgagtgccgatttaggttttagttgaagatgctttcaaccatccgagaagaaactgttccgcgaaaacagctactttacgtgggtctttttcaaactaaatgtgtgtccctttcaaaaaagggtgttttttttccttcttgccaatatctgttctctcttcctcttcaaaaatgtctagttttggacctccttttcacaaccaatgaaaaggattacatttgcttcgatttgctgtttccctttctgggcatgaatcctttttgactgagcttttccctgctatctaggctagaagatccattgcatgcctttctatctcaaaatatgtggatactagcttttttactttgttttaaaagaagttgctttctgaaataataacattaggagggaggcatatatagttatttatgtctcattcctagcgtccttgtaagtgtaccatttccatatatagttggagcattgataatgtacaattttttttatccagcttgtttcagtttggttgcatatataattaatatataatgtttcggaaggacaccatttcggaagcacaccatttctttttcttaatcttaataatatataatattattaagattaagatagttgatagaaggttaactatagtatgaaagttaattagcttttaatcattcgtttgtgttcaaagaataagcttgcctggttagactagtcagtcgatgtacatccaagcaattgaaatctggaaaatagatttgaagttacaataattcgtaacaaaaataataataataataaattttcattacattctcacaaataaagaagagattcatagttacattatttatttaagagtgtcctcctactctggtatttattttcctattgataaataaaaaagttccttacaactttattagtaacaatataggagtatattttttatgataggaaataccaattgcatttggttgctgcataaactttgcaccttctctaatctcaatcagggtttgaaacatttgaaataaccggtgattagtcgtcggtttaatatcctataatctaaactggcatgtatacatgcggtcaaaaagcagcatttgtgtaatgccaaaaggcacatggagccctattcatgtcgtggcgacactccattccttttgtttctatctgagaagttcacacttattataattttagttttctttcccaataaattaaatactaatatcatatgatgtgtactatatacgttatgataatgataattgcacaccacacacaacatagttgggactcgggagttggggcatgcatattttttaattgtacttaaaaactataacagctcgataaaggtggatctttttggataaaattatgtaccaacgcctcttataaacattataattattaatgtataaagtactcatataaacctatgaaaaattcttttttgtttgttaaaatttcacctgtacctttattattaaatatgcaaaccatatttaaaacttattttttcacatttaatcacactatttaattaaggaaaattcctccttcattttgttagtctaagtttcccttcaggggcgcttggactggtccttgtgtgcgtggatagaactagagattcgctgtttgaaacaagacaggccctcttggccacacctttcttggaaatgaaactgaaatgtttgtggggaagcacgcttttcatacccatgtttacattatacacacacacatgcctacacgaacagtaactaagatattgactagtttcgttattttgccgtatccctgccaaggaatggaccacatttatacaagccatgatctgatctcatctgtgtcttcttttcactcattgctagatctctccactctcaattgaaattgtcgtatattctaatccttctacgcatttattttattaaattttctcttctagggcaacttgatagattgctcatattctagctgtactagtcaaacctagctcacccttttgacccatttgacaattacttgactacctctatgaaatagtatatccatagaatatctttctgtgtgcttattctagtatgtaaaagttgcacttcgttatatggacttgtcattgttacaaataatttgtctgtcacaatcacactaacccaataagatcgtgcaagattatagctatagctcatggtggattgtttaatttaattccgtgtgtaggagcttatgcatatttcatacgtaaggcatgccattagcagtgttgtcattattatctaagattccaaagtatctaactgaaaataagtacactgacataataataaataaaaattaaatgagaagccatttactactaggtactgtaagcttagcttcatttgaaggctaataatcttaggtcccgagtacctctctgctagctttagctaatagtagctacctgcttctgtcatcttcaatagtttctctctccacccttttaacccattctatctacttatagttaagaagaaaaaaaaaccacaaaaatcaaaaatacatattcctttgtttttatgcaacaggattttataaacaaaagaatttctctgctttctatttttggataaataattctagggaagtgcttaatttatcaatcaagctcgcgtgcattagaaagctattttaacttacagctaggtttgttgaaaaattgtgcatgcaggtatgttccacgtggcgagaggtgtcgcggtcggatctgctgtggcagcggctcacgagacgcatatggcgacgcacctatcgactgagggccacgtggcagctggagtacatgtattggcatcggacggccaggaacttctcgacagggatacacaggtttttcgacccaccggtgtttaacccttcggatcaccacctcctccagaacctgctctgtcgctgcctctctctctccgacacccacctggcgtgcggcttcgtcgacggcaccgtgcgcctcttcgacctcgaaacccgggcccacgtcaccaccttcttgtccctacacggccacctcttcgggcctttctcacgctccgtctcgggcattgttatcttcaactccaacatcgccttcgccaggctggacggggatatctacgtggataacgtgaacgggcctgggcctgggcccagccacgctcgccgggccgtggagggtgacgttgtcaacaacggggtgctggtcgggttcgcgggaacgggccggtggtgggtgggcctgttcgcggggatagcgggccgggcttttcagatatgggacgcgcggagcgtggagcgcgtgttcgttggtggttctttgacagatccagaaacggttatggggtggcatatgctgacggagttagttgaagccgtggggcgcgtgcgcgtgacggagcgtgagtatgttgtggcgtgcaccgggtcgaggttggtgtgtttcagttttcggaacccggaggtgttgttgcgtgacgtggggtccacgacggggttcgtggtgagttcgctggatgcgagtcaggaggcgtatgtggtggtggagaggaacggcgttggaacggttcggcgagttagcactttggagcggttgagtcggtttcggttgaaccggttattatgggttaacgggttgtgggcatgcattaaccttggctacgcgttaacctattcgcctgcgccttcgccttcgttgagggtttgggacattgagcaagcgataggacggttgtgtgtgacccttggggtgagagggggagaggtgaatagcttggtggccaatgacagacacgtggctatctcttccattgacaataacattaacttattggattttggtgtacaggatccttagttagacctaggtttaggaattattattattattattattaggagtactatgctcacattcattctaacttcccattcctttttgtacctatctctctctcacaaaaatcacatccattgttattgttattagttattactattattatttaatctttccttctctcccttggtcactatctatttgttctacgtagaagacaggccgaggcaggcacctagtagatgttgagagtttaatgagtccaaaaacgtgggaatctagcatgcatgcgctcacttggatcttccaatagtcaaaatcaaactacattgtttttaatttcctttttttctcttccattctaaacagaatcaaattaaaacacctttactgaactgtctaatactattctttatacctatctcaagctaagaatatcttgtttccatgctagtagttaagttacatttcataacctattattaatcaccatatcaatcgagtaaagctatctaattcaatcatttgagtatgtagcaaagatgtttggattttagttggttttgatatgatggttatgaatgaagaaaatacaagcaactcatgacaagtttcatggtgtgattaacatggtggctcaaggaacttgtaaatgagagtatatcaaacgtagttttgcttaattaatagttaaagtgatttatgagaaattatgaaggttgatttactagcaagctttgaacaatattatcataacttgaggtgagtatgacaattttacaagatgatgtttcaaagtcaggtaaaaggaggataaaaaaaaggtgagaatgcaatctgatttttgggtgctaaacgacattggtattttttttcaggagacgccatccttttaaaggtccaaacctgtgattaaatttgctgagacatctagtgtacattggttgtagatgagttttgttttgttttcttctatattggtatgtataagaactaaatgttttccatataattaagaaccgaatgaaaaaaaaatgtataaagacagaaaaggttttgagttttcttccctgtcagaaatctcaaaatttgtatttatacctaataaaaaagaacctaataaacatctaaatttaaagttgatcacacgtgtgttttttttaaaataccccatcatttactatttatcacatcatcatcgcgtttgcaagggagtacgtacaccattatggtgccaaacttgagtcgttggttataagcatgcttctattaattcatataaatactgttcactacgtaagtgtaaatgcaagagacgccgcaagtgcaagtaagcaggaaaataattttgaagttttagttatgcagaataactaaaaatgtaaaggccgtacatgcatgaacagttacaaaattaaaagcttatgataaaaatgaatgacaagttctttattagggcatttaaaagagggaatgaatgaaggacaaagtgaggtagagacatgcatggtggtagcctctactactgctctctagtccctagtctctcctgcttctatgcttgacaatgcttttcttctgctggtctgtctttctgtctgcttctgatatatcgtagctgctgctgctgcatgctactgctgcatgctactgctgcaatgcataccttagccaccctagctatatatatagacctgcttctgatatactaatatatatagctggctgcaccttcgatgtttctctctccctcatatttaattttaggctttaaatacgcgcatggcatagattgattgagaatggaatgtaacttctgaccatggctttccaacttcattatatcaatatgaaattatgtccttttgactcttctaggagcacttgaacaatggatggatcactttacgacttgatggtacaattcaaatatgaactttttttttcttgttggaatttaggagatagtagttttttaataaattgaagtagctagcaagaatgattcattcaaatagtataatacaacttttttttttttttgcagaatatatgtggactgtgtgaaagagattattagctgtaattacttttccttattttctttaactagaacctgtttttactttatttttcttcagttttttcaacttgaatagggaattatcaaaagactagtagaaaaataagtggaaatccgccttaataatagagttttgagcaatataattatagaagggacctcaaagattaatgtaaacatgagatgtagaaatattgatgcataaaatgacttcaagaaaacaaggggacttcacaaccccactaattgattcttccatattctgtactgtttagtgcataacctaaaagttctgattggtgggaattaaatggaggaaaaatagagagaaagattgaaaacaaaacaaaaagagataagaaatatgataaatagtcattttcgttttgaatatgtaaagtgctgataaattcgttcctgaaagatgaaaatttaaatatttgtattcaaaagtgtaaaaagtgcgacaaattcatcattccattaacttctttccgttatcgttaatgaaagtgctaaatatcacaaaaatgattgtcaatatgactgctgactagattttggacaaaatgtcagtaagttaccgttggacaaaaatatcagtaattttctattcgacctaaacgtcagttagttaccattgaatcaaaatgtcaataattttcaattagactaaaaagtcactactttttcattggaccaaaatgtcggtaatttttttggcaaaaaaggccagtaagtttccattaaaccaaaatgttattaaggataaatcttttccttatttttatcgttacaaacatattaataacaatataataatcacttaaaaaataggaaatcaaatataagttaaaagaaatataataataatcataatattgattaataaccataatttgtttgtcacaatagaaattatccaaaataaatattctaccagtgtaccaaaataaacattgtaacaatgcattaatcattataaatttatccaaattataataattagtcacaatatattataaataaaagacatgcatatcccatatttcacttctttgaatcttggtggcggggtagccctagtagattgtgactacttattataatttagataaatttgtaatgattaatatattgttacaatgtttattttggaaagagaagcttatcaatagattgtgactaattattataatttggataactttgtaatgattaatacattgttacaatgtttattttggtacactgatagaatgtttattttggataatttctattgtgacaaacaaattatgattattaataaatattactatggctattatgtttcttttaacttatacttgctttcctatttttaagtgattattgtattgttattattatgcttgtaatgataaaaaaaggaaagatttacccttaatgatattttggtccaatggaaacgtattgacctttttcacaaaaaaaaaattactggcattttgatcaaatgaaaaattactgacattttggtccaatgataacttactgacatttaggtccaacagaaaattactgatattttagtccgatggtaacttaatgacatttttgtccaaaatctagtcagcaatcatattgacaatcattttgtgacattttcgtccctctgtgtcatgtatgcactttcgttaacaataacaaaaagaagttaacataatgatgaatttgtcgaactttttacactttcggggacaaaaattagaattttcatctttcaggaacgaatttgtcagcattatacatatggacaaaaatgattatttaccctaagaatttttttttaataaaggagaaataagttggaatagaaataaaaagaccagactctcactattttatttatccttaaaaatgagcataaataaatagtagcattttccttttatttcgttactattgttctcaaaccaaatattcttatttctattatacttcttatctatttttattcattttctattttttactttgttctttcctttttcttttttctttcttatcaaagaatcaagtgatgcgggtgataacatgatataaataaaaatagagtaatattattttttcctgcacttcacaaacccccaatcatgtaaacatgagatccatgactattttttccctatttcttctcttatcatattgtatttacttatcatagcctatttcttctatttttctgtctttttagctatctaaaaaagacatggggattagagaaattatcttatgaataatgatatataaatatctcaccaatacttttttagttttcttttcttatcatataaaaaatcttaccatacctatattttttactctattaaacattttaggtattacataagagtttaaggtgtctattaaacttttttcttatcttattgcctgttgggctgccgcatatgataataccgacgagtgaaactcgaatctgaaaatgaatttctttgtgtgtgtttgaattaacctttaattatttcaaaatcaatttttaaatcgagtgaaaagccaaaccaacaaataattgtttcaactttttaaatttttcatcataatttctgggaattaaaattgattttaagaggtatccaaactattcatttcgatttcagttgaaaaatcgtaaattatattttgatagaaacttctatttatttttaacttaaaccaagatttggacatttccaaactgcaatcacaacatgctttgtacaatagtgacaaaaaagttagattctcatgcacatcaggacttatgatcaaaatcatatagcataagatttggtaaagttgtacttcaaggaagaaaataaaggagaccggtttttttttacaattatatgattttttaggattaattgtatattttatcattcaattattattatcattttacaaatcttaccactcaatttttttttacaaattttatcacttaaattttaaattttcacattttaccacccaagtttgttttgtttatttttaccacttgattattttttttgcatttgataacaaaacgacatcattttgtaaaaaatgataactttttttattgacacatgactatcagtaaaatgcataaaaatttaaatcttaaaatgataaaattcatgaaaaaacactttaaagtaaaatttgtaaaataatgaaaattgtggtaaaatatgctattaatccttttttttatgtataaattgttccagtaaaccaaagattaagaatcaaggctaaagataatttataaactacctttcccataacctaggttgagacataagtaaatgagactggtggatcaactcgaaattcacaacttcaaaaatacccaaattacaaagagacccaatttagctagtatgccaaataaatagcccaatcgtattcaacaaattcttgatttaacccaaaaactgaatcgagtgacaatttttgggttatacaaattaatctaaactgcatggtaaaatattacacttaaatatctaggacttgaagctaatcggacacagctgcagatatataactagaatcttccaatacgaatgttaaaattacaaacacgcacagccataggtgctgagcctgagatttgttacagaaatttctttccatgcaaaaatttgtgtcgacatagcatatctgttacaagcatcttatagcataacttgtctaaaaaaattgcagctgtcttttgtatgcttgcagaaccgctatcgccgaaattttaaccagtggcatgcctagtaaaagtttgactgcaaacgtgtgcactagcttctacagtatacagtcattcacctaaaatattccaaaaagatcaaatgtcagcaccccggtaagtatgccttggccttcaggctacacatcgacgtcaatcgagctgaaggatccttaaaaattataaaatatgaatgcatttttttttattctgtggaaagaaactaaggatgcatttaaataaagaatttcatcaagcacttatttaatatactcctaccaaataaaaatatgttcataaaattaacagaattactgagataagttaaaaaaaacttattttaacaagtttatccgtaaatcttattaaaataaattgaaaaaaaaaaaacttataaaagttgtgaactactttctcacaagtctatttttttttccaggcaccccccagataccattataattctgaagattgcttgtgctatatgtagtatgcttgtaagtgcttgcttctacaaaagtatttgctagcttgctaaaagatacaactatttcattactgaaatcatctcattcttaatcatgaataatagaatccaagccctaatgtctctcgcatctcaaatcaaactgccagttaagcaacttcaagtaatcaacgaacatatacatgcaaaatgtcatagataaatatgcagaaccaattttcgtataaaagaagaaaatgcaggtaacagcatagtttttttacttgtaggaccctgatggaagaacataaacacaatgataatagaggagcaggataaaaaacacaccaagcagagatgaaaagaaagcagcaactagacaagccaatttgaaaatctgttaccaatatattctcctctggcattccatgggcgatcttcaaaggacttcccaataatattgccttttttatttagaattccctcttgacagcagtactgtggaaaataatcattgaatgttttgcttccaagttcatcgactccattaaagagaaagcttctcaacatatcctagtataaaacaggaagtgaggatgtgtagtactaggttgtagaggaattaaataaatcgaccacaaatttggcctaccttggcaagtgtgtcaccaatcagcttcttcaaaacaccttgtcccggatcctaatttcaagtatgtccatgaaccaggtccattaaaaggtaaaactgaattagaaatagattatggagaagtctttttcatttttccttcttattttctttacctaaaagtgtttttagataagtttatccaaacatgtcctatatattctatatagttcgaagttcaaaatttattccaaaggtatttgacaattttattgttgagatttgaatgctagaaaatagctttctacattgctctagaaacaataagttaggtagcttttttgaagatatcaaattcagcataaccatctttgttaatattatcatctaaattatcttcaaccgatgctaactaaatgagtgaagatccttggtgaattagaaaatcctaaaccaattatacctgggaccaatataagtttgcttatggctagatcaccaatcatatttatgattggctgtcagaaaatttagcaactgtgaactaccttttcagctctccatgtcagatatctatgttgtgcttcgagattgtgggaaatctgagattcatctgtctctttaactgctttgcatatcaattccaaccatacctgccagggtaacagtcatcaagagaaaaaaaaaattacacgtgtacaaggtcagttttatcaaagttcactaaatatattatactccctccattcctatatataagaccattttcagaaaattcttgtacctttttataagaccattttctacttgtctcttgtattaattattttttcctaaaatatccttaattaactacaaattttttagcaaaaaaaatatgctggaaattaacaagataaactctttctcttattatgattggagaatagtataaagggtaattttgaaaatagtataaattttttagcaaaaaaaatattaagggtaattttgaaaatagtataaattattgacaaatttaatgtcacaaactacattaatcaattttattaaagagagtgaattagttgaaaggtcttatatataggaacggagggagtatttagcaaaatatgaatagtcattcaagaagttgaccataatgctggggttattaccttgtaatattccctaaatgcagaatacaaaatatcatatttttgtgggtttgaggtaaactttgtccagatgacaattggcgaaaaaaaatttatggactcacttgtaagcttccctccccatggaaaaagctgcataaagtcagtgttaagtcaacacactagatcatttaagaaagaatttctataatttacagaaaaacagagatgcatccatgatgaggacttttttaatgaatcaatactaaatggaaaagtaaaaaatgtagaattcgtattaaaagtatatccagttttagaacaatgcatcactcatgtggctaatcaggtcaataagtagctgttattaacaaaacgttgcacattgttatgcagtcgagtgattaactgtttctaaactgaaaatacttctaccaataattaattcttataattttcgctaaaatctttgcagttacctcagcatatttaaggccaagaggaattaagcttttaaagtacttctccttgtactcatactgattgatgatatcatgcaaggggttaaggtccctgacataattaattcaaggttagtgctctgcattacatacagtaatttgttcttaaaaaatgtttgaagctatcaatagcacagtgggggaaaactttttcgcattatcagtgatgccagtgaacaaatattagatttctaaaacgattaaggtgtaaacaatattggggagaaatgagagctacagactgtcacatagatttgctttaggctttatttctaggtaaagcatggtctttttcattatgttattttggccaagtataaactcccaagtaccattatataaagtacatgcactgacaatatgactaaaaacaattaaattgagggataagtaatccaacataagaaggctaacagtagattatcaaaaaggatgacactatgatattcttccacatctgagtaggtggaaaactttagtagacatgcagcacacacattaaatccttgagtttgtatttactgataaaggcatattttgtttttctcatttattataacagcttcaccaaatagttctttctaagattggatgaagaggagtcaatactcaataccaatcttcttccaaaagcctacaaattcaaattaaagcatacatcaacttcagatctaattttttattgtaaagctataatacataagaaaatgaaaagcgaaggccaacaaggacatttttggtacatataatgtaatttcaagtagtcaatcaatgatgctttcaatgctaaaatctcctttacatagaatatgacatatgatatcttaagatgacaaatatagcaaatttactgaactacggtttcaagatcacattttaaagagaatgaaatagctgattagggctatacttcatctttttcaaggttcatagggaaaaaaaatagcaaaaccaaagggctggagtaaaacaactactatttctcttgcttaaactaacattgagatctaggacatctgctcctaaaatgataacttcactcttcccctcaagctccgtttggttcatcgtgtggacaattcctccacaatcaatcttcttttctggaaatgcatgcttttattcaatgagaaatataccataaaagatacaagaacctatttaacaaaataatgaaacatcctcttcaagtgattatgcaagtaaatttacacctaatgaaatatggtattttcttttaccaagtacaataaaatacctgttactgagactagttgatacttgataacctactttggtgagtattagtaggcaatgaaacatatgcatttaccacacccaaatgaagacataaaagttctctgttgtgtgtacctcttgaaagtatatattcacatagatcaaaggctggcttatttttttaatttaaaactgaatgattcctactttgatttgcaaagcaacccaatataggttttcataattaatggtaaattctttttggatgggaaaatattgcattcccatgcataaatttccataagctgaaatgcagtttaggaataagtttaaaaattgcaaacatagtccaaattgctagacttttccacaactaaaagtaaaatatgagaagaacatcctttgtacatttatataagtggattgcaacagtggaagaagatgctaacttacaacacaacaatgtttgttttagcagaggtgaaaaagttagcacaaaatatggggacatcgtattctgcttttggaaagacagtaaaatccaaaacctgcataagaagttgaagacaaaaaacagaggcagtaagcatattgtaaaataacctttccacagacaggacacagaagacagcagaacatttcagcaatgacatgtcaatttttttcttgtgttgttgaaaacttgaaatagaattgcaaaacataaaacattaggaaaatggaaactgagaaatcacataagctaatcctaagagaatttctaagatactctaaaatattccaagatataatattgatgttatgagatattccgacaagtgttatacctcatggggatcagagattgcatattgaaacagatacaacaggatgcttactaattctgttaacatgcattgttatagatgaaggatcctttattggtaaaggaaaaagaaaactgagattggcagaaataaatacagacaaagtcaaattttgaaattgttattgctgtaataaattacaaggtactacacaaaggcatattgtgttaagacagtagtagataccaaccatatatcaatttgataattgataggcattaaaaaaaaccacctgcattgtttcagtctcaatgatcaaacttcgtagaagcctaatttttgcagcttcaaatgatagcgtactaagacttcctttaacatccttggaattcatgaaactgaacttttcctagcaagacaacatacaaaaatgtagattgaagatctatgcacacaaataatggtggagagcaaattaagcgaacaaagcagaggagtcgggaacaactagggacaaattcacaactaagaatcttcaaagcaattatgtgttcaataaaactaaatttaaaataatactataacaaaatataaacgaaatacaaagttgaataactcaataacagcaagaaaataaaagttaacggcttattaattgaagagctagttctatcctgagaagctgaaacttggtgattggaacagtacaccacatcctcaacagggcaacacaaaaatataaaaggacaagatatgacacttagtcataataaaactctttttcatctcatgttttttcttccataataaatggaagatgtttattaaacattgaccaaaccaaagtgattgtttacttcatttatatttattaaacactgccatccaaagtatggtaataatctcttggttttgagcactaaccagagaacttgttttatagagaagttcattcaatttctttttctcttcttcctcagggtcggccaaagggtaagtctactaaagttatagttttaggcctaccaataaaaaattattagttattagtttttataaagttgtgtcttggtgacttattggtcatgagttcgaatccggaaacagtctctttgcatatacaagggtaaggctgtgtacaatatccctcccccttatctgcgcacagcgtggagcctccggacaatggggtatgtagtttttttttaaattagtttttataaagcaaaaaggtcacatatgttggcaaaatggcctaacatataactctttcatctaaaaaagaaaaaaagtattttatcaaaatttgcttcgattatgtacaggtgcatcagtaaggtaaggtagcatttggtatatggacaaaacagaatgaaatattgcatttcgttcagttctccttgatttcacacattctatagaaccccaatgtgcatttgtttcaacttttaagtcctgttgtatttttaaatgcaacataaaaggagaattcacatattatgttttgtccgtttcagctgacacatataccaaacactgcctaaatttggtttgaagaactctgcaaattaagttttaaaaaacttcaaattaagttttaaaataccagaatggaactaactagccctaatcaaccattccaggtccaacacatacaggaaaatggccataattttttaagaaaaaaaaaggaataagagaaacctgtaaaggcgaagggatcaagtgagtgtggcgtttggtttcatccaaagcaaactcaacaaacttttgataagatactgaacaacttggtatgcaattactcctcctcatcctcaaggcacgagtagaagtggctatcgctgttaacggaggaagaagcgtacgttgcaaagaaaagcatgatgaagaggaggaaccgctaattctaaatcccatttatgttaagcagattcttctgcactgaatcactactactagttctaaattctaatgttctttctatccaagccagccacacgtgctcagcaactttctctgtttctacttctagcgcaacccatcttaggatgctttggatttgtggactgtgtggtccaccattcacgtatagtaatagcctgtgggcctcatcatttggcccaaatgaagttgtccaaagtccaaattaccctcctgtctcactgtcgtctctcatacactattcaatagcatttgacttttcaaattcaattagcaagtgcataaaactaaactaattatcaatgattattaacttaacagtcaaatatcattcttcttctcaccatgatattagtgtaaagtatttattattaatgattaatctttattaataaaatataattgatcacgtttaataaaatatctctcaatcatgttaatttaatcgtaaaatatcattttatcaaaaatttgttaatactgaagaatttttatttgaaagaatgtggttgggacactttaaattcaaagtcacttataccttaaaagagatgagaggaggagataaaaataattaatatgattggtgcaagtgtatgcaagtataaatcacttcatttctttttcttcttatcacgtcattcaaactaagtacatgtttgaatcctaatcactcattcacctttcacaaaaaattcacatgaaattgtatcaaagctaatttgattggtttcacggttttaaatgtaatttttcaagtctccaatgtcaaaagttaacaattataactttcagaatctaaacataattcctttcctcttaaccaaattccaaacacgtactactagttgtttcttggatgtacatccaaattgtgtggataaaaatccaaacgcacaagtaactaatctcaatcttcctactacatctggtggtttcaattagttaataatggccaatgagtgtggtgagtgagcgtgctgtgtgtgcggagctagaatcagaggaagaaaaatactaacatttttatttggttctaacattagtttgttggctggcttgaacagagaaaacactcacaatcaaaggggtagaaattggaaccacagatatagcaaacaagaattaaaacaagtcaaaattttgagggagggagagaaagagagaaattaccaagaattttagttgttgagttaacataagtgtaattaggggaaacataagtataaaagttttggttaaaattcactaaaaagtaaacaagtttgaagtaaaattaactaaaaagtaaaaaaataagaataaaaagtgaaattattttagcatgttatgtcaatttaacgataaaaaaataaaatttgtaatatcttaaaaataaaagataaaataagttaaattaatttattaaaataaagttgggcaaaaaataaaaaaactaacaataaaagttacaattcgtcaaataaattgtaactgattttagacataagaacaagtaaaaaactctcctcttatcttaataggtttcggactaatttgacaaagtcccaaaatcacatgctcaagttcttgctttgcaaattgcactcttctttttcctattgactcaaattagttatacctatttttacattattcaataacatttcattgaatactttcaacaaaaatcttataattgaattaaaaagatatatcatatagattcaataacatttcattgaatactttcaacaaaaaacttataattgaattaaaaagatatatcatatggatcaaaccgaaattatttgatctttttgatgcacatcaaaattaacctaattcgaattttaaaaataaatgaaaataagaactattctttgtattgttgtccaacttttacaaaatttgacataaataattcaagtaaatctcctcttagctggtaatttcctagcatatatcagccccccttaccaacacaatttttattcatataataatgtcctggcactgccccttctgttggtgcagtttttattcacacaaacacagctttttgtccactttccatcagcttgaatgattagggcttaaagttaaaactaccataaactagtacatacagtagtatgtaataaggtgcaatgcgcgcaaaacaactctgcctctctttttggagagcttgggacaatgtaacactaatgaattaataatttgattgttaacaaagtttaattttggatccaccaatagtaacttcttcccttgtgcttgtatgacttgttggcatcctctgagccacatagttatttgattttatgcttaacatcactgttttaaagatgccttgttttgtcagagcttttcactactcacgtacccaagatttgtgatagatagcgggctaggaatttagtgtccagattgaggaagtttcttccctccccttgatcaaagggaatgaataatgagaaattaataaatcagtcctcaatcccatgcaaaagcaaagacacaagaagaaaaacacaacccatttagctaaattttcaaaataaagatcagattccacagttacccacttctagctaagagagtagttaggagatagcgttgatttagaaccctggctgtcattgcattgtttgctttccccctcgtctttctgtttaccttttacttgcttgtttgtttgttctgtggatgttgtttaaagcttttatcactagatacttgtgctaattgcgagaccacaaatcattattatgctataatatattttctctaacactaattaattataacctagtataatattgatacaccattaataaccacacaatactttattcttttagacaaaagaaaaaaaagaagagagtaatacacaaggagagatacccaattggacgtactttaattttgagcaaaatagctaggcatgatatccagtggcgatctttgtttttgtctttttaccaaattagtgtattttgtttttaaaattattactaaacaagtgtagtttttaaaaatttacccacataacataagtaagtcgcacttcatgaatatggtttcctttaaactttttatgcaattttttttacagtttataatagtaatgtctgttaattttggacagtcataaatgtttttggcatttggtaaaaaaataaataaataatataagcaagacttacccatattgatttttttttgtaaataaactacactagtttagtaattttaaaagtaaacaactctagtttgatagaaatcctggtattttcgagcgattttgaaaacttaaacgtgtatcgtttctatatgtttgtttaattgaaaaatgaaaaaaataattacttgggagagaagtggaattagagtgagattctttttcgtttatcaaacctctaaattataatttaattgaaataaattatcaaattattggttgacgtataatataataggaaattgttgaattttataataattaattactttaatatctctttattaaagtcttataattataggaataatcaaatttagtaagatgactacaattgaggtatacttcacttttaaccaaagaagcgcccgatcgggaaaaaagaagatgtgaatataccattttgaccttttctttatattttaagcatcacatgactattctttatagccattaaaatatttttatgatttatgtataaaatattcatcgtaactaatgtttgagactttgagttagccggtatatatgttacatgatctatctacaacaataatttgtaggatcgagcagaaagtcctaaacgataaagaaaacaagaaacgaatacaggagaaaggtaagtgaaaagatgagattgtataatcacataaacagtggaccacagttcacagatgattggctctataattgaactctgctctatgttgacgtatggtcatgacaatggtagaatctctgatcatatactagctagttgaccaattagtatgtgggcaaaaccttacaagaacaaagtacaaaggatagttgttggggaagaaaagaaaagaaaaaaaaatatcggtgaaaatatttatggttgcaaactttactttacggccatctccttgtagttttgcagttatcgagttgctaagagcaagaatagggaacagtgcttcccctcgagtgtgtccaacgaacaagtccaacctaataaaaacaacctcttatgacacacacactctaatattgcagcactgagtgagtggggtctagtctctctccacagaagcctaattaataaatcaaatgtcaatttcaagcccccccttaccctaactaaatgaaattatattttatgctttctgtctcaaaggacttggggcttttgcttttctttgtgggagaaaatccaaccccgtgagacatttcaaatagtcattgcctcaccatgtcatctgaaaaccttttttctttcttgctttctttctttgttgctattcaaattccacatcaagtgcaaaaacataaaattactgtagcgtgacttttctatacgtgtgcctcacaatggaaggaaattactttagccactgctttggtggaacatgatccatcctcctttcctttccatttatttattctaactattcagcagcaaaaatttctttctccagtgcgtctctttttgtttctgaattgcactgttttggtgttcaaatgccaactcgattggaacgggaaatacaagttcatcttattgtattcaagttaatagagtatctttcttaatttcctgatctaagcaaattattatattatttgcatcgatcaccattatatttgttcaagtcaatgatcattattaaaatgtatattctatcaaataattaattaagaaaattattcattttaattctatatcatgagaattaaacattagcaagaaataagaacatagcagaccaatcaaccatctgtatgtgatatgattaatgaatacttttgttctttaaatatgtatatatagtcttgcgtttgattcttaagatgtgtatatgaaaaaatataaagataaatatattttttcttaaaatttagtatttattttattattcaaaatgttatttaaaacattttaagaatgaaaaaataaaataaatatattttgtaaagattaaattgaaaaaattataactataaaactaaatttttttattaaattgcataaaaaatgtatttaagttaaaaaaaatatattgaaagaaattaattccagatttaagtattttgatccttgagattcggaaaaggaatatctgattcattaaaaaaacagaacatactatatttatatttttaaattacatcagtgcatcagttgtatctttgtttttatagttaaatgaaacatttggtagaatcacttggatttgggtctttactcctttaatgttgatctaggtttattgaaggtttttttaattctaaatctaattcttctctttaaatatattaattgagggtgagattacgttaagtcttaattgcagaaattgagagactgaatttgagagacattcttgagagtacatttgagtaagtctcaatgtttgcatattttagagcttagagtgaaacaccgtttgagtgatcatcattgttggagaggttgagtgtaccaccattttggtgtgtttgattataatccattattatcattatagtggaaattgattctggacttggtttcgtgagttttttttttcatattaaattttttttttcttccacataaaactatttgattttgtctctcctccttttttgattttagtgttttcgcatttgattatttgaggtatctcaacagtaattgagaggcaaaaatccaacaagtccaaggtataagtcaaattaaaaagataatttaaccaaatcttgaaaactgttggaatccaaagttttgcttggagcgtaggaaagggaaacaatgttacaaaattatatagatcgaggtctgatcatagacatggaggtcaactcttgctagatattgtacctagttagtagtcatgcatcgcgtgaatgtagagttttcaaccttatcagcgcacttgccagctattcacacacacacacacatatatatatatatatatatatatatatatatatatnnnnnnnnnnnnnnnnnnnnnnnnnnnnnnnnnnnnnnnnnnnnnnnnnnnnnnnnnnnnnnnnnnnnnnnnnnnnnnnnnnnnnnnnnnnnnnnnnnnnnnnnnnnnnnnnnnnnnnnnnnnnnnnnnnnnnnnnnnnnnnnnnnnnnnnnnnnnnnnnnnnnnnnnnnnnnnnnnnnnnnnnnnnnnnnnnnnnnnacattttttaccacaaaatatattaaatgaaagattgtacaataatataaaggtaaaatagtcgataattaataatataaaatgattttataattattttataataatttgtcatatataataaatttattaatttttatatattaattacttaatttaaaaatcgtacataacataacactacgtctaagaatatatttttgactaataatattttatgtttagatgagtgtttgtaaaataaattttaattaaaattgatttttaagtaaaataatttatatttagattcttttaaactaaaaacaaatttgctgtaaaaattaatataaaattttcaactcaaaacaaaaactatttcctatcacttttagtgcacgtgaagttccacacctagaaggaaattataaattatgacttctacctcgtttatttatatttgatataattttattagataacatgcattcatacttataactacattgtttaagactttctaataaagcgcgtcaaccagacgctataaattataatttttaagtgtgtatctgtgataacattggatacaacgcaatgcagaagcaatttaggtattactttggcttttttgtctcagaatgctaaatttttcatttgatgtggttgcaacgcctaaccaaacataggatacgcgtcatttcatttatttgtatatgacacaatttcattagatatgcatgcatacataatgtgtggccaaacacattcttagttaaaccaggattttaatcaaagtaaaaatagttttatccaacaatatattcaaacatttatacttttacaaaattaagtttaacggaattcaagatcaatgctttctactatgaaatggaacacactcaataataagatatgccaacatgcttattcaagtgggaggcttctggtttataggtttcccaatttttagacttgtagtctgaactgatagatcaatttttggtgatgaaacaggcatggcatggccccatagaaaggtaggaagcctcaaattcacacttgagtatacttgaattttacctctttatactactttattttgaaaaatgaaaaaaatatatggtccaaagtctcgtccagaaaaaaacacaaaacgtctgcatagactgggtgacaattaatcatacaacagcacgacgaagcatatatagaaaaattcaaagttagcgaactcaatttcttctctctctgatccgcaacggtcctcaattgatacaaggtattggaaaagaatgcaaacaacaacaaacaccaaatctgctcaccccgaaacctatatagaaaagcaacaagaggaaaaaagcaccgcattggttccagttctttggtttggaacttccttttggccccttctctcccctcgatactcacaattaaccttctctctctacatgcacaacaacaagtccaaccacaacaacaaacaacactccaacgtagtaacaaatgtaaacggtctctcccttcacaagttcacgtttattcattaattctttccccaaaaagtcaaaatatacttctcttctcacagttaaaaccccaccctcccccacacacttatgctcactttttaaacatttaattaatatttataatttttctttgtttctctttttcatattacatcataatccttataatgttttctttttctttttctcacattagatatataataggatattcatgaatatttttctccaaaaacattttgtaaatttttttgtcgataattaatcttttgttaaaaatctatttaattatttttaatgaaatttgatctcttaataaatttttccctatgtaattatatttatttatattaaaacttacgactttatctagagaatccaaatacagtttcactgcaagaaacctaatattgttaccccacatttatgctgctccatctttcacatgccacactttcttcttaaaccaaccattccagattccacttccactagctagctagataaaacttctctttctcttttcctctctgtgtgaataatatcgtgcatgtcatcaactatggtgcagcagcagcaccgcggagagcaagagaaacgacatcggttcttcataaacgacaacattgacattctccgggaaatccttaaacgcctcgacggtccctcgctgggcgtggcggcgtgcgtgtgtcgactgtggtgcagcctcacgtgcaacgacgactcgctgtgggagcacctgtgcttccgccacgtatcgtcaccgccgccggcgtcggtgagggcggtggtggtagcgctgggcgggtacaagcggctgtacatggtgtgcgtgagaccggtgctgagtcgactcggaaactcggagcgggtgaggaagcgagtgtggactcggcacgaggtgcagctctcgctctccttgttttgcattgacagctacgagaggctcgggagtggaaggatccccagcgacgcgtccgcatcgtccctcatgttcctctgcaacactgtcaacgtctgatctcatcatcatctctcatttttccaccatttctcattattcctttgatatcataccaaaaaaaataataataatcaaatcttggtccctgccttgcccaggaaataagaagcacgtactgccccggtattgatttgtctaccatataccaaattaaaatatcaccaatttgtttgttttcctcatatttttgttatattattttataatagaattttttatcagcaaatattaatgattagtattattagttgttattactcataaatttaaagttgttaactattttttatcttcttcttccatcactatatcaatcttatatcttaatgcacatatcaataaaaagcttgtgataagcgcggatcagtgatgaatgggtcattatcttttatttgtgtatatgaagctaggtagttcatttgacaatcaattgattttgttaaccaaggtttaattagttgaactagtactctattttaaactttgctttattacttcctatcatcgtcctccatttttttcttgagtaatgttatatatcatccaacttcatcatcttactagtttttatagtaagtattgaataaaaataaactatttaatatcttaaaaatataaaaacttaccacaaaagatagtagataaatttgtagaagaatgaagtttgaggatttaaaattatttatttttctttaatttgattttaccagtaaccttttccttttttcttttttgtagttgccctccttgcttccttccttcaaattacttttttttctttctttacagcgaagttagtnnnnnnnnnnnnnnnnnnnnnnnnnnnnnnnnnnnnnnnnnnnnnnnnnnnnnnnnnnnnnnnnnnnnnnnnnnnnnnnnnnnnnnnnnnnnnnnnnnnnnnnnnnnnnnnnnnnnnnnnnnnnnnnnnnnnnnnnnnnnnnnnnnnnnnnnnnnnnnnnnnnnnnnnnnnnnnnnnnnnnnnnnnnnnnnnnnnnnnnnnnnnnnnnnnnnnnnnnnnnnnnnnnnnnnnnnnnnnnnnnnnnnnnnnnnnnnnnnnnnnnnnnnnnnnnnnnnnnnnnnnnnnnnnnnnnnnnnnnnnnnnnnnnnnnnnnnnnnnnnnnnnnnnnnnnnnnnnnnnnnnnnnnnnnnnnnnnnnnnnnnnnnnnnnnnnnnnnnnnnnnnnnnnnnnnnnnnnnnnnnnnnnnnnnnnnnnnnnnnnnnnnnnnnnnnnnnnnnnnnnnnnnnnnnnnnnnnnnnnnnnnnnnnnnnnnnnnnnnnnnnnnnnnnnnnnnnnnnnnnnnnnnnnnnnnnnnnnnnnnnnnnnnnnnnnnnnnnnnnnnnnnnnnnnnnnnnnnnnnnnnnnnnnnnnnnnnnnnnnnnnnnnnnnnnnnnnnnnnnnnnnnnnnnnnnnnnnnnnnnnnnnnnnnnnnnnnnnnnnnnnnnnnnnnnnnnnnnnnnnnnnnnnnnnnnnnnnnnnnnnnnnnnnnnnnnnnnnnnnnnnnnnnnnnnnnnnnnnnnnnnnnnnnnnnnnnnnnnnnnnnnnnnnnnnnnnnnnnnnnnnnnnnnnnnnnnnnnnnnnnnnnnnnnnnnnnnnnnnnnnnnnnatataagtaaaaacaaagatgataccatcttaaaaaaaaacaaaaaacaaagatgatactattttttttactgatgagacattcaaatatataaacttattgaactgttgagaatatttgtaattagcaaattctacaatacaatactctaaaacggatacaaagcgggcataaagtgtagtattttaatgatatcaatcatggaaaaaatatgatatcacgtcaaattttaactagataatcatattcaataagacgggcaaatcaaggtgaaaaattctttgctgaatagtctatttttgaaatggcggggtagcacaaaattttcaaatgtcaaaatcaaaacttccatctccttcgttgattaatttaattcacctccgtaaaaggttattttacagtatgagtagtgttgaagaatacgaaaaagaaaaaaacaagtgtccttcttattgattgagacagagcaaacacaatcaacccagtggacaaacaaacatgttactgtgatcattgactcaaagtatgcatccaatccaatccaaccacttcaatttttggcacaaccagatttttcaagattcaactgttgtccgtttgattctgtactcaacatcatttcatttcaagtttcaaccgatacattaatattgttttggtccttcattacatataatattttttttggtcaccacattacattaatttggttgttactttcagagacgaatgtcattaggccttccccgttagcccaaataaatatttcagagaccccatatttttgctggttaagtccaaattatttgacattgacaacttgaaatcaatgtcagaactcagaagtttaagtagaactcaacctaaaaaattgcaaattcaatcgcaccaaactggttaaaaattgtaaacccaagtgaaataaaatggttaaaaatgttgcatccaaaaaagaagaagaaataaagtctttctttttgtgtgtaagaaagtagtaagtcaagcacacacaaaaaaggaagtttagattactaaaataaaagtagatagattatacacccaattccaattattacatttatatagtcatttatgactccataaatacgtatttaatgctaaccaattaaaatgtctacaataataccaatcaaatttgaatttaatactctcttcctttttatttataagatttaattgattaaattatgtttattaactgtcaaaaataaaaatgttatattaaatcttgcatcattagactagtgggttattctaaatagttgtataatatcttatattaattctctttttttataagatgggaaaatattaaataattttgttatttttaaaaataaaatataaaataatcaatgtggagcattcacaagtgcccaatgcccatcactgataattctccaaatcatcatccaacctcacaccaactacagaacacagtctctaacttccaacttccgcaaaatatataagtttaaactaaatttaagatgcaataaaaaaatgtgaaacataaaacaaaagaaagtattagtagttttctttttttcttaaaaagaaataataaataataataaatttgctatgcagtcattagtcattacgcacctacggtgcacgttagcttgttccaaccacctcagtaataacagcgtttacttgctctgaaaattatcatcattttatttataataattcctatttttattttggtctcttctctttctgatcggcgattgtcggaagctcctattcatcgccgccaccttgcgccgaatcggacccacttcggatccgagagccaccccaatcctttcttcagagtttttgtttttccatagcaaaggcttcacctttaccatttatcacacaccactgtgtccatacaaatcgggttctgtgttttcctgtttttagcgaagcgagattcacacccaattttgcttcatctcgtaactacacgtgtcgatctggctcttcttcaacaccccattatcgtctccaatctcagttagtctttttttttttttttttttaattgttgtgattatttttattgcatctgcctttttttcccgaattaatttaaattatgagtataaattttgggggtttcagtcttaagactttcgatctatgcgcaaaagttttaggttttgtcaaatttgggtgaattgggtgctgattgaaagatgggtcacctctacccgttgattaatgttttattgattttgaaattttggaagatttaggaaatagacgggaaagtaaagtttaatgctttatgtggaaaattcaaaaattgtgtttcaataaactaaatgccacgatctgttcgtttcattccacatttttggcgtatttgagatggagggtgcttggtttctcggtaacaatagggagcataagttctagattgatgttggcaaatgtctgtttaattttgtgaaaatgtttgagttggtgtttttggatctcagatgaaagttttgtgagttttaaaatttaaattacttacttggtttttttgttccaaaacttttgcagacatggaaacgaggttatgtatgatattggaaaagatgttgggctggtcgtagtttctgtttcaagagttcagttgtgaagtgatcttttgttcctacatggaagcaaacaaggaggaagcacttaaagcgatagagattgctgaaaagcgctttgctctgagagactttgccggtgctaaaaactatgctgtaaaggctaaaactatttgtccaggattggagggtatatcgcaaatggtggccacatttgaagtttacattgcttctgaggtcaaacataatggtgagctagattactattcgattcttggattaaaaccttttgcagataaggaggctgtaaagaaacagtacaagaagttggcggtgttgcttcacccagataagaacaaatgtgtgggagctgatgaggcatttaagcttgtttctgaggcttggacttggctatcagatagtgctatgcgcagttcttatgatctcaagagaaatgtgcagttgggtgggactaaccagacaaatttgtctcctgcccatgctacaggggctgcaggttataacaaatgttccaatttgtcaacccctcgtggtgggcttgacaccttttggacaatctgcacctcttgtaaggttcagtatgagtatctgcgcaagtatgtgaataaaagactctcttgtaagaactgtcgtggcacttttgttgctgttgaaactggggcggccccagcaaatggttcgtttccatattgtccttggtcatatgtagcaggaaatgggtatggaagtcattcatttgatggagttacatatgttccaactagtgccccctatttcaatgggaatggagtcacaggataccattctggacatggatatgagtacgttcccaacgtttcatttcagtggggctctgctggagttgtcaaccaaaatggatcagctaccttacctgctgattctgttcatcaggccaatggaaatgtgaagaggggaagaccaaaagtcaagtcaggagctgataagagacatcacatggtagagactatggtcaatacaaattcagacataacattctcctgtagtgaaccacaggaagataaactaagtagacctgacaagaaacagaaagttgttgtgggagccagtttcagaaatggctatgaagaaaagggttcaaaacgtgcttcagagttgatagtggctaacggaattgatagcatgggacaatgccaaaagccttcctgcacagttgaagttcaaaccaaacaatgttacatggcaccagcctttgacgcgagaaaattgttgattgagaaagccaggaaagaaatcaggaagaaactggaggagatgaagttgtcatctgaagcaacagcagcagcagtagctgcagctctgaatgagaaagaaaaatcacaagctgaagttggtcaagtaaaaagagagacatgtagaaaagcagctctgaatgtttctggtctacagttagagaatgggaaaactggtccaatctcaattactgtcccagattctgactttcatgactttgacaaagataggtcagaggaatgcttcaggccaaagcaaatatgggccttgtatgatgaggaagatggaatgccacggttgtattgtatgatccgtgaggttgtgtctgtcaatccatttaagattcacatcagttacttgagttccaaaactgatagtgagtttggctcagtaaactggcttgattcaggttttaccaaatcttgtggaaatttcagggcttttaattcagatgctgttgatcaagttaacatattttctcatgttctaagtaaggagaaggctggtcgaggtggttgcgtccgaatatatcccagaagtggagatatttgggctgtgtatcgaaattggtcgtcggattggaacagatctactccagatgaactgaggcatcagtatgaaatggttgaggtgctggatgattactcggaggaacttggtgtttgtgttagtcctcttattaagttagctggatttaaaacagtatatcagagtaatacagacaagagtgccataaaatggatacccagaagagagatgttgcgcttttcacatcaagtgccttcttggttgctgaagggggaggctagcaatttgcctgaaaggtgttgggaccttgatccggctgcaactccagatgagcttcttcatgctactacagaaccaaatgctttgtaggttatgcaatagtgaaaagtgaaaacaattatttgggttgtgctttagcattcttcccagagtattttagatttaactgtacactatgtctcacttggttagagaccaatgagatattaacaacggatgttttagaaggtgaaattttattttgtaacatttgtctagtagactttaagatctagtgattgcttgttcggtaaagtttcttctctgtaactcttgtgagagaggtcaggacagattgcctgcttgtaactctatttccgaccagtttttactggttggtaaagaattcattcaattaaaggctgaaatcaattttaaatccaacaactttaaagagagaaaaaaagaattaagaggattattgtattgtattgtatcatgcaagtgagcaagtatgcagaaaattgttaatttgatgtcactgatcctccttttcagaaccgaatactaacgggttcaaaacaaattgttgagcttagtactaaaacgttgataacctttttgagtgatgactaccaaagttagtgtttactgttattgaaactacacttataatgctacatctacatgttagataacaaactgttcaatttgtcaacctcgtgattggctggacataacttgtcagaactgctgtgggagtggcactttcttgccattgaaactatggcagtgccagcaagcagtccatttggtcatacagtcatactcatacgtgcctaaaatgggcgtgaaatccattcatttgatgaagttacacgtatttgttctaactagtgccagtagaatggatatgaaagtatgtattctagttagtgccaactatttcaacggtaatggggtcacaggatggacatggacatgacaatgttcaaaagtttcagaggagctatactagactctacaatcaaaatggacctaccaccttacatgctgatatgacaatgttcaaatttggctctgactgcgatcaatggtcaatataaactcagatgtatcattctgtcattgtgttagcttataggatacattcatcaatcagcttacaaactcagatgtatcattctatcactcagatgatcaaacccgaggcatatattgtttacgtgagttcaagggataagaatattacatgatatatacactacgttcatcaatcaaaccataggatgcctgaagcaatattactttttaaggtaaaagctgcaaccatgcatgagtttatagcataagtctgtgctaacaaaactactggcctgttttattttggcaaaatttgatttattttagaagcatgacagtgactttatggttattgatgtttgatgtgttacagattattttcatgccagatataaagcacaagagttcacgtgaatacccgagaatcaagattttgcttcttaaagactaaaactgagtcattatgcattgatgatcatttgttaatgtcataatatatagtcactggcttttgtaaagttctatttgatacaagattgtcattcttagctaatatatgttggatagtccgagaacaatgttgcttcagatgaacagagagtaggggaatatagtttacgtaattcagtctcattactcttagtaaagcaacacaatattatcaaggtggagcttcaaaagagattgcagaaaacaatagtcaactatttgtcatagtcaagaatttctggggattggttgatcaagcttgcattgagattgcacgtgacatcagcagaaccccaaggcaatttccaattccagctaatcatcagcagaggaactaacacaaagaagtcatgagattttcaaactgttggaatatatatatcatattagataactctaaaaatggattcaacttatgctagagttttgaataattggagtctcaatagcaagacacaagttacgatggcaccagaaagagtttgtgaaaaacctgcaactcaaagaccagtgttgctagcttgctgctaaccattcagaaattgaaaccatctttatggtgttaccagttttctagtgttaaatgtctaaatgtatgtgtcaatgtgttaaaaactgtactgctctagtgtaattttaattctcgtgtatattattgttagattagtttaccatcaaccataacttggttgttctcttcttgtcttctgatgtgaaatcactttgtagctcccggatttttatgtacaatttgtagtttgattgagaaaaaaaagtgatatagttaggcttttcactttataaaaagccaaagagggagggggatccctaattcctttttcaatattagtatacagataaagtatacattatacaggccttgctttgtaaaaaacaaaaggaagatttgtataaaaaccaaattcatcagggacaaaactcttaaaacaagaataagagcatcgtgtaaaactgaaaataagtaaagagagtactaagagattatctacaatgcaagaaaaagaactggaagtaatattgatataacaccttataacacaaagtaagcaaaaccggtgtgaaatagcatccattgcaccaaaaatatcgggatcttatgggaagtaatttaagataccttgctttagttaaacttggagattaccattgtctgtgacctctctgcttgtaaaaaatagaagcagaggaactttttaagcaattccaagctgtcttttatttgcaatgtttgtggacgctctttagtgtcacaaaatggaggatctcacaaaattatggcaaaagatttaatttcttgtccaacctgcctttcaaagatgcaactctatcagatggacttgaagatattatagacaccaggcacagagagttcccaagcattctatgttccttcaagcaaggctttgctaccactgacaagttggcagtgcttgaagctcatcggaatgaggacgaggtagccattactcttgtttcaaaaatatccgaggcagggacattcatggatgaagctcaacagaaggaacaagttttgaaggaacggttcattagattgaaggaagaaatgaaagactgtgaggctgccttatcatctctgagagaggaaaagaagaaatgcattgcagaaactatagggtacaaaaaggagcttgaaaatgtgagaaaaatggtggaagatcaaagcaaagttcggcaagaattatttgaggtcgcttataaatggtgggctctgtgtagccaatttgagcacaatcccatcgctgctagaaatccctcttgagtcttgaggatttccattgtttattgcttttttaaaggaccaaatttatcatctttcggaggctactatgttgttaattgtttactcaaatggaagtcttgtgcaactactgtgctattcatgagtgttttgtttctggtattgtatactgcaatattttcacgtagcttggttttctacgtttctttttccacatagagcttgaaacgcctattgtattatgtcccggaaaaaaatactcgaagcgaaaggttccgaaattgcattagtcaaggtgcaaatagctaatttgcattcttttaatacttatttggaataacatttttcaacaaaaataataattagttttcgttatttattttcttaagaaaattataaaagaaaataataattctaaaaaatctaaataagaaacgtcaggagttagaaaactatgaaatgaatcttgaattccatcacattctaaacatatcatttacaaatgattagcaattttcctcgtgtttaaaacgaatatttgaaaaacaaaaagcgtggtgtataaaaactaagaaggctggattttttaaaaaaaataaataaaaaatgaagaatatgttataagtttgatttcaaccgttcaataaataaaaaatgatgatgatcaattatatttggctttgcaccaaacactattatgtataaacaaagtcaattcaacaaaattaatagagtctggtagaagaacaagaatatcttaaaagtatggaagataaagtcgaaagattgagtgtgtcctccttagtgcgtcacaactcagaacttagttatatggataagaacaagaaaagaaaaagagtctttaatattggacttaacttataatcttttgtataattaaactacttgcaacataaaacaattagggagtttctctttgtactgcttgttattctaagtatactctccatttgtctctgtcaaattttattttaataatttatttatacaggtagttaaatttgacaatctgaaaattaaatttgaaaaataaaaaaagaatacatttaagatgtgataaaatttcaaaatgcaactccggattttagtgttgtaagttgtaacttacaatgctttaattgatcataaaaatatataatctactaatctagggagggagggagttgagagtcccttctataactctttagtagtgtgagattccagtactttcttagattacctgagtgtatgactagcaaattccatcccctttctctgtgatttgcaatgtatttggtgatcacggtatcctcttaagattccaaggtcccattttgagttcattatcaccttccttggaacaaaatgatgctctttgaatgaataaagtagagaatgaccttcgatggttaacttactacaacatgaaatttatgcttttattactacatcttttaaaaaaggaagggtgttcgtaaaaataaattaaatacactttttttctcttctaaaccaaacacgtatataaggacaacattaaaataaaaatcaacaaaataatacgcttagaaaaagggagtacaacatgaaatttattgggcacttctgattttaacctgttatgttgttaattactcgttattgcccccaaaactaagggagcaatcaggacaagtgaatgagtcattgacaatgacgactagatgataataataaaagtagataataataattcgtgaaaaagaaaagaccaagacttaagcttttatagcatgaataagacaaaagacccaagacttagcttttttagaatgaatgattagttgatggtgtgggaatagtagtgctagcaatcgtctttgcagcagtggagcgtgagtgaggattctcttattattctcttgtttctttggagattcgagcaatggaattcatctctgaaggtggtgtatatattaaaaatatggcagcaagttgtttaatttgcaatttttgcggtttctgtattctaatataataatttcctttgggagtctgcagatcatatatatgtttgtggcgtaacgcaactgtcatagatttcaccgtctcttgcttgtaaagtcatcgatcaacacttgtttctcaccaatctctgcatataactcaattccttgaatcttctgtaagagggagaggtaagcttacgtatttttgctcatttcctatttgcatggatgacatgttcagtccaaaatccaaatcaatgctccgtccccccagggctactagatctgctaattctttggtacatatagataaaataaaaacaagaacaagtggatatgaatttttttttttattttttttccttctcaaaatgtggatgtggatctttctcatcaattcatcataatgaataaaaaataacatatgaaaactaattttggtaacatagctattttttttaatacattgccgaaattagtgttcgcaagatctgaaaaaagtagnnnnnnnnnnnnnnnnnnnnnnnnnnnnnnnnnnnnnnnnnnnnnnnnnnnnnnnnnnnnnnnnnnnnnnnnnnnnnnnnnnnnnnnnnnnnnnnnnnnnnnnnnnnnnnnnnnnnnnnnnnnnnnnnnnnnnnnnnnnnnnnnnnnnnnnnnnnnnnnnnnnnnnnnnnnnnnnnnnnnnnnnnnnnnnnnnnnnnnnnnnnnnnnnnnnnnnnnnnnnnnnnnnnnnnnnnnnnnnnnnnnnnnnnnnnnnnnnnnnnnnnnnnnnnnnnnnnnnnnnnnnnnnnnnnnnnnnnnnnnnnnnnnnnnnnnnnnnnnnnnnnnnnnnnnnnnnnnnnnnnnnnnnnnnnnnnnnnnnnnnnnnnnnnnnnnnnnnnnnnnnnnnnnnnnnnnnnnnnnnnnnnnnnnnnnnnnnnnnnnnnnnnnnnnnnnnnnnnnnnnnnnnnnnnnnnnnnnnnnnnnnnnnnnnnnnnnnnnnnnnnnnnnnnnnnnnnnnnnnnnnnnnnnnnnnnnnnnnnnnnnnnnnnnnnnnnnnnnnnnnnnnnnnnnnnnnnnnnnnnnnnnnnnnnnnnnnnnnnnnnattgattcttataaatacaaataaaataaaattgagagaaccaatatttgttttagcaatactataactggttttttcgaaaagataaaatcaaattagagaaaggtatatatcaaaaaatgaccaagacttgctctnnnnnnnnnnnnnnnnnnnnnnnnnnnnnnnnnnnnnnnnnnnnnnnnnnnnnnnnnnnnnnnnnnnnnnnnnnnnnnnnnnnnnnnnnnnnnnnnnnnnnnnnnnnnnnnnnnnnnnnnnnnnnnnnnnnnnnnnnnnnnnnnnnnnnnnnnnnnnnnnnnnnnnnnnnnnnnnnnnnnnnnnnnnnnnnnnnnnnnnnnnnnnnnnnnnnnnnnnnnnnnnnnnnnnnnnnnnnnnnnnnnnnnnnnnnnnnnnnnnnnnnnnnnnnnnnnnnnnnnnnnnnnnnnnnnnnnnnnnnnnnnnnnnnnnnnnnnnnnnnnnnnnnnnnnnnnnnnnnnnnnnnnnnnnnnnnnnnnnnnnnnnnnnnnnnnnnnnnnnnnnnnnnnnnnnnnnnnnnnnnnnnnnnnnnnnnnnnnnnnnnnnnnnnnnnnnnnnnnnnnnnnnnnnnnnnnnnnnnnnnnnnnnnnnnnnnnnnnnnnnnnnnnnnnnnnnnnnnnnnnnnnnnnnnnnnnnnnnnnnnnnnnnnnnnnnnnnnnnnnnnnnnnnnnnnnnnnnnnnnnnnnnnnnnnnnnnnnnnnnnnnnnnnnnnnnnnnnnnnnnnnnnnnnnnnnnnnnnnnnnnnnnnnnnttatgacaggtttataaaatgtttttaaatagcttataagaacaacttattcagagcctatggaaagactcatctttgaatcctgccaatgcaaaaaatataaaacatgcgtattttttattattattattttgacttaaatatgtttttatctttaagatataactatttttttacttttagtccctaattttttttttgacttttcatccttgaaattttcttttcttggatttggtccttattttgtgttattttttccctaatatatcagttttatttgttttagtctctgcaataatttgttttttttaattaatcccttttaaaaaattataatagaaatgtacctgcatgatgataaataggtaactttcttccctatgtcttcttcttgaaaatctctttctttcgcaatataagggtggggtatcaacaaaagatactccaaccctcaagtaaagtctcgattgagagcaataaacaagtgtattaaatgagaatgaataatgtccttatcttgatattcacgtaaatatttatacataccttagtaggtcgattcatggactcttacacatggtaacctttataggtaatgttcatctaatcatcattaaaagattaaattaacccttaattattattatttagaataaactagacattttatttccaaataagtaactagggagctcaggtgttcgacaaggtcgaatacttgactacatacagggacccctttcagacaacattgtaataagagtaatcgggtgtttggctaagccgaacaccagggcacttatgtagagagattatcctgggtgacaagatgatgatagtactcaggagttcgacatagtcaaacacctaagtacttatgtagagagatcaccttgggtgacaaggagattagcgtattttgcctagccgaacacttgaatacttatgtagagaggaccaccttgggtgacaaggtgatttagagtactcgggtattcggcctaatcgaacacctaagtacttatgcagagagatcaccttgggtgaaaaggtgataagagtattcgacctaaccaaatacttgagtactttagaagggatatgctttaatgtcctaaaaatagtactaggggtatttatgagcattcggcctagtcagatacccatatggtataagaaattatgctaataaatttcattgaaggactaggatctcatgcaatgataaagccattactagaaacgagcggagaactagccgaggagggggaggaggttgggagggaggaggggaggacgatgccggtggagtcatggaaggagggggaggtgaggaagccattgacggtggcaaagagggtggcgaaggaggaggagatggtgtagttcacgcgtttggatgtcaatagtgtatttcattcatttggacatctgacttgacttcttatgtgtatcgctgacgtgtccaactaacggacacgtcatcacattttagacgaagattaacgatatgtatcttccacaagacttttgaagtttcagggactcaatgagaagcaaatttttttcagggatcatttacaaaattcaagtatattttaaggatctccaaaatatttaagccttttaaatataaaacattaaaactaatcactacaactaactccataacttctttttttactataaaagtgatttttagagaatgtaaagttgtaaacaaaataaattatcttaaaatcatttttatctattaagtatatgttcaatatgtatataaatttatttttataattaattataaacttactatgtaggatgttcatctcttttgttcaggttaaagaaagttgcatttagtggagcaaattgatggaatgcctttacggttttgcatcttctatttcaagagatttagtgtgtggagcaataaatcaaatacgttatccttgttgttttaacaatttgattgaagagcttgagaaagaagagcgcaatttgattgtaacgagaaatgatgtccaaaaatttgttgcacatgccaagaaacaaacgagaacgcctgctgaagttgttaaccagtggctgcaggatgctgagaatgacgtagacaatgtgaatcagttgctgagagaggcaagaacaaaaaaaagttgttgttttgggcactctccaaattggatttggcgatactgtgtaggaaagaagttagcaaataaaactagggaccttgaaaagctcgttcaaaaaggtggaccatatattcaaattgaacgcacaactacacttccttctagcacacttgatattctctcggaaaaatgtatgaattttgacagtagagaatctgcttatgagaaactaatggaagcactgaaagataatgaggttgtcatgattggattgtatgggatggcgggttgtggtaaaaccacgttaggaatgaaagttgcaaagatagcagaagcagaggatctttttgacaaagtgattttcgtgactgtgtctagtacagtagaggttgcaaggatccaagaaaaaattgctagttcattggagtatgggtttccagaaaatgaaacgggagaaagggagagagcccaacgtttattcatgagaataaccaaagaaaaaaaacttctagtgattttggatgatgtgtgggagaagcttgattttggtgccatagggattcccttctttgaacaccataagggtttgaaggttctcattaccactagatcagaagcagtttgtacttcaatggattgccaaagaaagattcacttgccaatcttaactagtgaagaagcgtgggctcttttccaggagaaagcacttataatagaaggcacccctgatactgtaaagcatttggcaagattaatttcaaatgaatgtaaagggctgcctgttgccattgcagctgttgctagcactttgaaaggcaaggctgaagtggaatggagggttgcattgggtagattaaaaagatctaagccgatgaatattgaaaaaggtttgcaagatccctacaaatgcttgcaattgagctacgataatttggatagtgaagaagccaaatcacttttcttgttgtgttctgtattccctgaagattatgaaattccaactgaacttttaacaagatgcgcaatagggttaggtgtagttggagaagttcgctcatatgaagaggcaaggagtgaagtgattgcagccaaaattaagctcatgagttcttgtttattgttgaatgcatatcatgaacgtgtcaaaatgcacgactttcatcgcgatgtagcccacttgatagcaaagaatgaggataagctcattaagtgcgaattggagaaggatgcgactttggagcaaaattcagtaagatatctatggtgtgtgaaatttccaaatgatttggactgttccaatcttgagtttctttgcataaaaacaaaattggaaatatcagatgaaattttcagaagaatggaaaatctcagagttatgtatcttgaaaatggagggtggcacaaactaccattgtcaacaatgacatttaaaacattgaaaaatcttcgttgtctaatccttagcaattgggaattaagtggcatctcatttataagtgatatgaagaaacttgagtgccttacattgtctgattgttatttgccttcattccttgaattacaaaatgatggtgtagttgcacaactaaccaacttgaaatcgttaatgttatataaatgtgacatggagacggataattttgatgtggtcagaagaatcccacggctagaagaattgtgcatcattaatagacagcaagaatgggatgtttacaatgaaaacatcattaaattctttaacacgtttagtgtcccccaagaactgcaatggtatacaataaaattaggaagcctacgccaagatgatgatgatgatgcaaattttatcgcccataaaagaactctattgcttagctgttttcacatatcaaataaggcgattaaggatttggcaaaaaaagcaaaggttctatccatagcaaatactcagggaggtgcaaaaaatatagtccctggtatatttcaattggataaaggagatattcacgagttgaataagctcgagatttgtaattctaaggagatagagtgtttggttgacactagctatcatttgagtgaggtgggaattctcttctccaagttgcttaagctgaaaatatacaagatggatcaattaaaagttttatggcgcggttgtatacctcctactggccctcttgagaaattagagaagctatatttaagtaattgtccacagttgacatctttcttcacgcatgctattgctcaaagtcaagttcaatccacaatcttccagaatcttcaagaagtgatagtaagtggatgtagagaattaaagtatgtcttctcagccaatactgttcgaggcctacctcaactgaaagtgttgaagataaaagattgcaatcaactagatcaactagttgaggatattgtcccatcaccacctgttacgaattatacgaattatccacttgcacaccaggatcaaaaacaagaattagataaaatcattcaatatgagcaacatcaacagtttttgaatcctcattttgaagctaatcaattggaaattttcccagaaagcacttcaattccaccaggaccttttatgaaccatagctcaggtacacattccatgttgcatttcataagcatgttttcagttttaggcttttagcaagtatacatgtgttgtaatgggctgcatattcaacaaaaattgtggttagacaaaacaaagcattcaacatgaattcaattgacatcgtaaaaaaactcataacagtatgttgaactgttgataggtgcatttctttttaaatgaactgttgatatgatttattgcaatcattccaagttttttccttttaaatctcaatcattataagtgattattgatctaagcaatgattaaaggcagataatatttcttaaatattgccaataatcattataatttaattttatcaagtggggtttccgtaaaattttagcaaatgaataatagctctattcctcccttaagaactaaattgttgaacttaagtcaataagtgtgtttcttatattacgcttataattttatataattatttagttaaaatttataaggtatgtgtttgggtttgaagttatttgacatgtacaattagaaatcacatttaaattgtgaatctattatcatatatgaaaattttaagcaatctaatttccggaacatcgcatacattatttatcaaatggtcaaagaagaatacattttcattttttaacattttagttccatataaaattattagaagataaggtcagtcataatatgaatcagcataagaatattgtcctagaatgattttattcttcattattaacttaatttgatgcttgtgtttattgttttagtccaaaaaaaaaacaatgttttaaaaatcaaagtgtaacttgaagacataacatttatataattgattctaatatgcatggcaatgttttgcttattagtaactgctttttcaggatcgtttactctatccagccttacaacccttgagctaatatcatgtccgaaattgggctcattgtttacggcatccacggctaaaacgttgacttcattggaagaattaattatagaagattgtgatggtttgaagcatatcctaactcgtgaaagaggtcataaaaataaaaaggaaaacgtcgttgaggatgatcgtgaatttcagagtgatatttcaatgttcttaggtttgaaacggctatccatcgaagggtgtgatttacaacatatattatctgtctcttatgttggataccaggcgaaattagaagatataaaaaataaagagactcataataattttgaacatcttcgaaaacacattcagattggacaacaagtgcgattgaagttaaaaaagttggagttgtgcgacctacctcaaatgacttatatttgggtggcttccaagaattcacttttcctccgatatcttaaaacattagacatagaggaatgtgcaaaattggaagtaatctttccatcgtgtgttttaagatgcctaccaaaactgaagcatctagagataagagaatgcacagaattaaagcagatcctcgaagtggacgtgactgataaaaaattgtctgatcattctacacagccatgcttcccaaaactagtagatttggttgtcaaagaatgccacaagttgaaacgtttcttctctgcgtcttcatctagtgatcttctcaacctggaggttcttatcatagatggagccactgaactagaagagattattggatttgaacaaggatattccaggaattcttttagcttccgaaatcttggaacattaaatataacgagatgtgcaaaattggaagtaatatttcctctgagtgttttaagatgcctatcagagttgaagcgtctagagataagacaatgcaaagaattaaagcagatcatcgaagaagataaaaaaatgttaaatcttgtttctctagaaccatgtttcccaaaactagaagtggtggttgttgaacaatgccacaagttgaaacatttattctctgcatctgcatctaatgaccttcccaacctagagcttctgatcatagatggagcgactgaactagaagaacttattggatttaaacgaggaaaaggtggtgagatagaaaaggccaaagttgagcttccaaaactgaaacttttaatatttatgcaactctcaacccttcaccaaggaactgaattgctgactgtaaagcatcgcattgtccacaattgtccaaaactctctttgacttcaacgactactcttcgggagctctgtgcagatactccttattcaggtaaatgcattgcatcgctaaatgtgttcaaatacagttatttaatatgaactcttcgtctaaccatgttaatcgttgtcccttatcccacaatttttctattaacaaaaataaattctttgttaactaatttttcaaagttcactaatataatttttaaaaaaatttaaagcttgcttgcactccacccctggaaccaaccaaaccgtatgataaaataccattatttatttttgggtctgtttgagtaaacttctttagaagtacttctaaaaaaagaaaaaaaataagatgaatttttctattaacaaaaataaattcttcattaactaatttttagaaattcactaatataatttttctaaaagatgaaatgatatttacaaatgagttaataaaaaacttatttaaatttatgaaaaaactcatttatttttttaatttttttattttaaatatacttctagaaaaaaattaaatccaagcatgtcatttttctcttggtttaatctttcatacatttgtcacccattacttaccttctttgtaagttctaacctcgtgcccacagcccaccatgtattctacgcaagttccaaaaaacagcttgccacccaaacaaagtgaacaacggtttgcttcaataggatataatgtatttcttttatcataaatataagaaaaaatatatatttttcttggttttaaatataaattttttttaatttattttattttatttaatgatattatttttaaaatattttttatttaattgaggttttagttccaattaggaataagttaaaaatattaattaattaagattgatgtaattaaaaataattaactaattttttttaattagtgtgaataattttattttatttttatatttgagaccagaatagtatatatgtgtgataatcatgagatgttcatatcgtgtatgtccattgcaacatcctcgtacaatattggtgccttatgatctcatgcattgacctgcagcaaacattatacccacaccatttttgcccttgtctgtcttaaacagtcacgcgtaccactttcattcctcttaaccacctctgtatcaccttctccacataccttatttctaacttccaccactgttttctacctcctgaccctctctccagtagtcaattgtattgatccccgtctcaactaaaggacaccaaggcaagccttgggatttacaatccatctggacaaagaatagttaaacactttcataaacctattccattcccaagaataatattttatgatttctaccttttcctccacctcttttgtgtcttctaggaatgtacaagaatttcggcccaaccaaattacccaaattagtgcaaaccacaccttactccgcctccttaaagtactctctccaccatacagaagtcatctaaattggaaaaaaaatactcttcaccttattatgcatagtggaacattccttgactgatggatttgtttggtaagattagctcataagctatatatataagtttaataactaggcacaatcagtgaaaaaaaattatgttatcaaccaataaaactcattactactatgacttttaaggtagttattattaaaaaaattaataaacttaattatcatacatgttgtttaactcaaatattctctttctctttcctgtatttaatacaaatttaagcaacttatgagtaatagttacttatataaacaactcaaaatcacatatgtgacatatcaaaataatatttttttataagtaacctattaaacaactctcattgtggatgctcaaagtaagcttgcttaccaatcaagcttgtcagaataacttataagttagtcagcgtagcttattagctgctagaatgccttagaaacacacttgtgacaatataatgatctaccatggaaagttgaagttgcatttcatttttgttactgtgtttcattgtcaaatgaagtcctttaatttataatgttttgttacagatttcaaaaacattggactttcaccgttggactttgtccacttgttttgcaatatgattgaatcagatgaattttctacaagtagcggcaccagtgagttgccttcatcacaggttagaacctgccaatctgtgcaagttaacctacctaaatacaatcacaatgataatggcatcaaatcggataactcatcaactacttcactaaactttgacagcagtataataatacatgtcattgcttcattacatcttgtctacatttgttatgacttaattaattgaaaaaaatcctcgttttttataatttcattatatttattaaaaaaaattacttgttgagctattctttttgtatattttgtcattgatcagattaatgaaaaatcagagaacgattttattgggaacattcctggttcagaggtacaggctactgcaacttcaacaaattcagagctgaataaaaggccaaccccaagtcccttggatatttgtcaacgtgaaacacattcacaggtgagtataccataagctataataaatattggaagaagtgaatagcttaagactcaagcatttaattcatcacttcatgtaggagttggtggatgggcaatcaacgagtcgatcatattttacagaccaacaaaggccacttggaaaaactgaaagtaccattggaattcctcaggtaaataatgttataccaactaaatatgcacattcttctgaatatttaagaaatggttaatatagactacagaaacccaatgaacaaattattcaaaaaggttctcaatcagagaaaattgtcattgattgtgtcctctaattcaaaaacaaggaccaatgcttgttccctttcaaatggcttgaggctgacatgcttattgtcatttcattttacaagaagaatgaaagtatgatacaaaattgcatatttcttgaatttctgcagaatattaagagaggtgtcaaagaaggaattgcattagaaaatgcaatgacattactaggtcaactcatttagaatcaattagctcgcagtcagggtcactagttacttctcagcataaatcatatgctcgtgcatatttttgtatggaatcaaccgttgaacatagtccaacttgtttctcatttattattttcagcatgagcagaatcccgtggaagaaaacacttctccatttcaaatgaacctagaagatccatcaacatccaaaagtaaaccacctactccacaagtcaatgataacaatcaatttgtacttggaagcatagctgaaacgatacgtgaacataagcaatttgaaagcatagcaactgtgttcgaaacaggcgagtgccctgaattagagagagaaaacaaaaggacatcaaacttacaaacactcgagcaaaaattgtcacccatttcttctccaaacatgatagaggtatatgttttttctttaaatctttttaaaaactatatattagtaaactaaatatggagagaaaggaaggaattaatatagcacaatgaaagttagcttactaatcaacatagcttttggcattgtaaagagtattgatgaaatagagacaaccattattggaaaagttccaacatcagcgaaactagcaataccaactgttttagaggtgaaaagtccatctctgacttgtatgacaactcatcaacatataatacatttgcatgtaagtttaataattaatagacttgaaaacatattttctaatataatagtaagactaattcttgtattgcttgttcaatatatcaaataaaagttcctggataaagaatcaaacaatgaagcaggttttccagaccaacatgcacttggagaatcaatggtaaccactaaaatcgctcaaattattgtaatactagcacatgatgatgatgtacattataaaacacctgccttttcatagctataactttaaagccactcaaacgttttttttcatttgcatttgtaatgcccagaatattgaggaaataggaaaaaaaagcgttcaagaggggcatccgttagagggagctacggtaaaaacgttggcaactggtgtagaaagcattagcttgggtagtggtgttctaactctcacctactctagtagcagggacatacttgcagaagatttccaaatccaagaaataatgccatgtcaagaaatccaaatccaagaagggttgaacctgatggataaacaagagggaataggcattgtttctaataacagcgttgaggtttctccaggttattgctttcttattgtctcttgtccatcctatatttatgtgtcacccactcctttaacttttagcaacttctgcagatatccgtacaagattgggagcatataagcactttgttgatctggatgatacacaagttgctctgctggaggaggcaataaaagcatatcctcatctttggaatacttgtgagatgtgtagtcagcgatttcaagctttgatgttaaaatctttggcagaaattttgttgttcctccggaatgaaactgccgttagtattactcctcagagaaaaaatgagttcgatagattatgcaatgtagctgttcaacttggatttgagaggtcatgggttgatgaaatgcgtcaacgtgttgtggcgagggatcctgagctggacaatgcacgagcaggaatccggaagcttctcaagaggcgtaaccatttaactcaggaactacgcgacatacagaatgaacttaagattcttaatgactttcttgatgcccagacaaaatgtttcgactttttatgatttagaagttctagccctacgcgttggttgtgtcccacttgtggggattttctgtttctccatacaaatacattttgcaattcttctaagaatgagactatcagtttctgagtctactgtgttctttgggacgtgtaatgctagcaatttaagtttgttatgcagcattttattgtgtggcaaatggatattattattgttttcgacttttgcaaatatatatatatatatatatatatatatatatatatatatatatatccctttatcttttaaacgtctgctagaaacagttcaattctttctttttcttcaagaaacattaagccggggtcagttcttgaattaacttgtgcaaaacaaacatatatattttgttaaattaattctctttgaacccaattgtttttccaacttgtataattgaaactcgagaatcaaaattacacaactgcaatgtggcaagagtacatttaagccaaacctcttgcattccattcacaaaagccaacttgtataattgatttcgatttatggaattaatttctttgatttggatgcttggagaacggaaaaatgcacggaagaatgtcattactggcagaatctggtaagacttcacttctagttattagtttaccacaaacgttggagcaaaaattgtcacccatttcttccccaaacatgacagaggtatatgttttttcttttaatctttcggaaaactatatattagtaaactaaatatggagaagaaggaagtaattaaaatagccacaatgaaagttagcatgctgatcagcataacttttggcattgtcaagagtgttgatgaaatagagagaaccattattggaaatgtcccaacatctgtaaaactagcaataccaacttctattttagaggtgagaagctcatctctaacttatatgacaacttctctacataatatacatttgcatatatacgagtttaataattaccaagcttgaaaatagatttcctaatagtaagactaattcctgtcatgcttgttcagtattgcaaataaaagttggtagatgaagaatcaagcaatgaagcaggttttccagacggacaggcacttggagaaacaatggtaaccactaaaattgcacaaattactgtcatgccagcacctgatgtacgttattaaacaactgccctttttaaagcggctcaaacatttttattcatttgtgatgcacaaaatattaaggaaataggaaaagaaagcattcagaaggggcctccatcagagggagcaacagcaaacactttgtcagctggtgtagaaagcattagcttgggcagtggtgtggcaactcacatctgagtctagcggcagctacatacttgcacaagattttcaggttgttgaacgatgataagctgaatgaaggcaacacaggaataacactttgtaaaaacatccaaatccaagaagggtcaaacttattggataaaacaaagggaataggaattgtttctaataatagcatttttttgctttgttatatgtcacctactccttaaacttttatcagcttctgcaaatactcgtacaagattgggagcacataaacactttgttgatctggatgatgcacaaattgctctgctggcggaggcaatagcagcatatcctcaacttggaatgcttgtgtgaagttcagtgagcattttcacgcatggatgttggaaactttggcagatatgttgttgttccttcgaaatgaaagtgccgttagtgttactcctcagagagaaaacgagttccataaactatgcaatgaagctgttcaacttggatttagaggtcctgaagttgatgaaatgcgtcaacgtgttgtgacaagggatcctggctggaccatgcacaagcacgaattggtgagcttcttaagaggcatgatcatttggctcaggaactacgcaacatacaagatgagcttaaagagtcttgatgattttgttgatgcccaaacaaaaatgtttcgactttttgtgatttggaagttctagccctaccctttggttgagtgttatttgcaattcttctacgaatgagactgtcagtttctgagtgtacaattctttttgggacgtgtagtgcgagcaatttatgtttatgtagcattttctgtggaaattattatcgtttttggacttgtgcaaatcatggttagataaatattttgtccctttatcttttatacatttgctgaaaacagttcaattctttcatttactttaagaaacattaaaccaggtcagttcttgaattaactttactttgatgtaccaataaacatatatattttgttgaattaattatctttgaacccaattgtttttccagctttaagataatattttaagccaattgctatcttccagcgctcttaggaggcctacctcaatcaaaagagctgaagatagaaaattgcaatcagctataagtctataataacacatcattggataaggaacgtcaaaacaagtcctaaattgagtttcctgtttaggaaaaagttgccaaatatgatcggcatttgctcagaaaattattttgcaacatgctcatccttacaactgcttgttataaacgatgctgagttgtctactctgtctatcaataatttacccattcggatcattagttctaaaacgttgactctatctgttttataagcatgacaataattctatttagtcacttctcttaaaatgtgaaatgtttaatatttgtatcagatttcataattaatatgcttttactggattcaatggcaacgattatgactattaagcaaaatttagtatctgttattattgagaacacctctaaaatcaaagaaattttctatcttgagggatttccaatcaatggttagaacttagaagtcctcactactaaggttattcaatttaccagagctaaggtatatatggactgagttccaaacattttttgagccttcatgttcaacatcttcataaactacacatttgcaattttccaaaactaaaggctatctttctccgcatctctgtcttgagaatgatacctctgttaaaggtcctagtggtagaacattgagaggaactggagtaaatcattaaggacgataaagaaaatgaaaatatctcaaattctaaatcccaaacagtttaaactccatcttgtcacactctccatctcaaaattctcgtccagtgcatgcaagtgtttgaaggtgaagcaggtatgagtagaggttttgcttccaaaactgaaacatgcagtctcaacacaacagccaaacctcgttaatttctgtgaagggatagtttcagaacgtgattaattttcttgtgcacaattgtccaaagtcatcactaacttcaacgactaccatcgaggacatgatgcaaacctctaattctggtaagcatattatactgtatcatatactatcgaggatgctaggaagtttattttttagatgatgatctatgaaactcgtaatttcaatccgtcgaaacatacaccaaggcacataccttacccctaaaaaaggatattaacccatccagaaacacacaccaacccgaacaaactaatgctttaaaatgagaagtgttacattaaattctagatcctttcataaactagctgacatcttctttcactttattaagtttaaccatcaaattgcaagagatttatacatgaaaatagatatgacctccatgttttaaccgttaataaatctatttttatggggtattagttcttttatttttatgatgatttagccttcttaaaattcataactccggaaaaattcagaatcataaagttctactatcattcattccatcacagagacagaaataacagagtgaagaagaaaaaacaacggaaaataaagcccgatttttagattctctattaatattaatggttctaaaatgaagttattattcttggcgttgtacaaaacagcgcaacaaactgatgagaaagtttcaagagggggttcttgggaggggtagccggcttggtagaccaagtggtgtagagaaactgtttgtgtgcttcaacgtggttgcaaaaaattcctctacaatctaaacatgcaaaatttggtcaaaatcaagattgatcaaccttaccataatctacgataattttagaagctatccaaacacacattaataggtgtgtgagttgtgagtgaagtacacagagacagaaacaatggaaaataaggcaaaacatttagattctctctattgaataacggttctaaaatgaaattattcctcttgacaagacatggtacaaaacagcagcaaccaactgatgatgaagtttcaactttcaagagggattcttgggaggggtaaccggcttggtaaaccaagtggtgtagagaaactgtttgtgtgctccaacgtggttgcaaacgagccgaaccttctgcctctctctcatccatttcagcactattttcatgtgattcttgcttgtcaaatctttcaatccaacttcctaaaacccgatcaagtttatatccattatctattgaagagaatgtgacagagaagctaagaaggtactagtacctggacacgttcccaggtgttagctacagtgatgggaccatgctccttaattatatcgaagagggttcttgtgattgtctgcctctgctccggcggcgttttcaggatcacgggtcccatcttcggcttcggtttcttcgccaaacatcgaatcgccgtcccaaacattctactctgcaaaacacatttctatgaatcaatcaacacattttctaaggaacgaaacagaaatagcatggatttcgaaacgaggcaatgcctgcgaaatcgaatcgaatttcccccaacaaacaatgaaggctgagagaagatgatagtggaagaaatttagggtgaactgaactgaaccaacatggtaggacttgagttcagacttcaatagtgggccggctcagctgggcttgggcctacgccactgttgaaacatcgccattttcttattgggcttgggtcatgatattagcagcttgattcctatgtgttttgtttttcaaatggagtgttactacactacaccggtacaccctacaccataagtatgaacatatgttttttacaaaaataactttcaaaaggatatattttaacaaatttatatttggtaaaattcgttgatatttgcttaacatgtccacgtgcgaacataaaataaatgaggcaaattttcatctaacaaaacagggaattaatacatgagtccactttgtcgtatgtcatttctgggattatgtgtatatttatgtaattgtgtggcttccaatttaaaaccaggtccgagaatttgtaaataagtaaattccaaaattaacattgtgtttgatagaaaggtaagaaaataaatgaaagtgtaaaaataaaaaataaaaaaataaaacttttaattaaaggcatataatcgatatctatttggcataatcgattgtatgttaaatctaaaatcaatcactcgttggcccaccactggcaccacatgatttctacgatggcccttgaaagggttatttgtcaaagtaaaaaaataataatgactttttagggtgtttttcatctcattttgagatgcattttcttgtatgtggggctcctgagttttttttttaatatttactttcatcttaaataaacaaatatgttatttgtcttttattatttttcacattcacaccttttactttcataggaaacaaacaacgtgttaagtgaccgaagaggatattggtaattagaaattgtcaaatcttctttctcaacggtcatgattcccaaaactagcaccaccaccaatcatataaccatgccacaatttgcaacctttgatctctctctctgcatataaaagtgacatccatatcaaatcctccagaagttatgctcaacatgaggttgtatccctaagcaggaatagtttgcgagctagttgcagtgacagttggagttgctttacatggtagatggaaaaaaacagaggctgttagctcttgctttgcctcggatgcggcaccctcaaacttacgattattaatggagcctccaagttgaagaaattttttgaaaaacaaacaaggtgatgaaatagaaaaggaagttgagtttccgaaattgaaactctaatatttatacaactagcaagcctttccaagcgactcaatgacatgctataaaacatttcatgttctgcatttgtctcaaactatcattacttcaactgcaacaacctattatgagttccttcgaatcatttcctaattcctatggtggtaaatactatacacactttgctttataaggtacgatatatggaggttcaaccaatataaaatttcgcggatgatatcgctaatggattctttttctttttttatttctcctcatttcaaatatattttggtttgttatttgcggtgcttctaaaaatattgattgtctattgggctatttgcacaagtaaagctatttagttgttggccaagaagaaagctagccggtttaaattgatattttataggcttaaatatgttatcatacttaaaaaatatgttattttcaatttactatttaaaatttatttttgatcatctatgtatttaatttttttttttatgtttccatgtaatactagatgttagtcttattatgctaagtgatgatgtggcagatgaagtgtcacgtcatcaaacataattactaacatattagtgtcacattatttattattatttaaaaaaaatcaattatccttcttcttcttcttccttcacctccccccaccccaacttcggttgcatcatcgtctccctctctagtaaagtcgttggcgagggctacctctatgcccagggcactgtcatcgcagagatccatgccgtcaacattgtcgacgaactctgtcgcgacgccattggtacctcaacatggagcccaacgattgccacgacaaccacaacgccatctatgctctactccaagttcttcttctatttttcaccaaacccacatgtgtgtgttacaattatgatgttgttattgttatttctcacgaatacaatgtttgttgttgggactctagtttgtgttttgtagttgataaatgatcccaccctttgtgaaaccaaactagggaggggtcaaaagggttgtgattggaatgaggcatcccttgcaacatcttcatggcaatgcagtggtggggcgaggttggatggcacggggttgttttccgttggagaaggggaagtcccatttgttttaattggatttttaaaataaattaaataataaataatgacatggtttcaatttggctatgtgttaagtgtaatagcttcatgaaatgacactttatctgtcatgttatcacttaacaaaacgagattaaagacatatattccattgaaacataaaaaaatttcaggtacatatatgaccaaaaataaattttaggtagtaatttaaaaaaacctattttcaggcataaaaaacatatttaagtctatttcatatatactgcttttcaatggcatttataatgttgcttcggattttcacttagaaactcataatagatacatgtaatgtcttctatgtcttaatcgatttggacaatgttgaaaaaacttttccacacacaacaaaattatccatgcacttaagaaatcttagataaacaagatggtaagatttttatttttgatatacaaagttaaataacaatataaaattcaaatattatcatcatcgtaatctttaaaaataagaaaattcttaaaataagttaaaacaaattaattaaatatttaaatctaaataaaattgcaaagattttaaacataataatttttttaaaaaaaaatctccttgaattttgaggcagcatgcaaaatcgattatatggacaagatctttggttagctaaacattcaccaaagtatcatcgacatttgatcttatctttttaattaagaaaggcatatgtgacatgtatttgttgtcattttctttttcaattttgcacaaaaaacatttcttcatgcgtcgaaaccacattatgagactcgtcaacaacacctcaattctcacagaaacactttcctgcttagctcttcgcaatgaaaattttcaatcttgataataatacaaggatatatatatatatatatatatatatatatatatatatatatatattttcctaatgattctgttgatgaacccaacccatgcacacggctatcgtcctcctgtaaagaaaatagttaagttagttaatttaattaataatgtcataaattttaattttatttcacaaatactcatagaattaaatgatttaaatagtaattatatttaatgacatcatatgtaatttaaaaatgatttttaatcaataaataattacataaaaagtccatacatgaatatctcattaatatattttataataagttaaagttacaaaaatatatcaagtcccttgttattataaagatttaagactattttgtctctctatctcttcctcatattcacttccattttaataccctcctcttgtgaaatgatgaactttactatcttaatatgcatatgatatatctttttagatatatctttttaagttttaaaattttaatatcaattgaatagtttaacactttaaaactgagaaatcaatttcaaatatgtatattcagtgcacagaattcagaaatactcctaaaaatgcatttatataccacctgatactttgatattaattgaacggtttaatttaatttattatctcattcaatctatcatctttaatatttctagttctaacttgaatttaaatattttaataaaagaatttattaataattaaaataataatatacacagaaaaaattatttatcataaatttaaaatataatttatatgttaaaaaattaatatattatatattttaattataataaaatttatatgctaaaaaatatttatttattttaaattataaattttaattaatatgtaagctaaaatactactagtaacaatcaatacatttgaaaataaatctatatttcttataaccagaaaaaataatatatattgtttagaagtactagtattgtcttgtttaatgacacttaactatgtctagagacttatttgcaaaagttatttaggtagttaaacatcaaagtcatgattcagccacaaaattacattattaatcaataatgttacacaaaatttagaggaaataatgtacttattatttattttcgagtagcaagtggcaaggctggcgcgtggcttgtgatgcaacggagtcgcgtggtgcgtggcagatgcgttaacacgaagcatgcaattctgagctgaaaaaaaagctttctccctctcttgtttcctgtcttaacatctcttctcacatcacttactttctctctcctctccatgtcttcttcttcacatcaaacgtagaatatctttttctttttccctttttttaatcttaacccaatttttactgtcgcaaagtggtaagcatatttagtttatactatttttttgatttgttatttctcctttaattcaataaatgagtccttgagatcttgttattggggcttccattttagcgggttgtccaatcttctccttgtcagatcgaccctttatcgtttacttaactgggaaaagtttcttacgaattttctcgagaaaaattgttttttttttttggtgggggattttacttacttgtttggtttctgttcagctgtatttgaggaagtttgatttgggaaatgaacaaaggacagtcaccggagcctcttgatttcttcatctggactgttgaggttaatcatttcattccctttgtcaattgatgtatttattttttaattattatttatattttctcataataaaaaaccacgccttgtgagttgtgatccctttttacgtgatttgtacttttaacatgtaattaggttttttgctacagttagtttaactaaatttgttgggtacataacttgaactttgtccatgatagtctgttttgtgatattcgtttgcttctccgataacacaagtaaaaaactgagattaaacctgttcttatatgttggaaagttgaacatagtattgtctaatcaagtgggaaatttggttgatgatgttgaagtccttctcaacttggaagtaattggctaatcaaacttgtgcgtgaattatttcatttaattgtgaatctcatctcctccctgttgttttcacaagttatctggtttttaaattaagtttccaattcttgccagataactttgttcaattgttcagtttgacactcagtttctatgatcattttaaagtgagggcttttacattattctctcaagaaaataatagattacactgaatgcttacttactcctttgtgcagcacaaacataagtgtaaatcttcgtttgatgagtttccactgcaaagctatatgcatctttctgtgatcattgaattttcaaacacttgttgttgcaactatgttttggaaaaatagcatctgaaactagattgccaatatattatttgtcttgattatgcccttagtccctgttcctctgtcagtgatgtggcgagcttatgatttatccttaggttattaaggtcatgtatctgaagtgtaaactattacagataaagaggtatcatcttgttattctcctttgatgtgtgtgtcaaggtcacaagattgcggtatgattctactcatgtattgtgtatgtttctacttatgtattgagtgttcaataatgcttattcagcactgttatacaggtctagactctacagtataattgatgcactgttatcaattactgatataatgtagtaagctctggaatgcttccacatattttcttttaattcatttatgctgctgtgtctgtatgatgaattgtgcaaattacataagacctatgttgacaaggatctaagcttgttgtatatacccttttggatttgcttcttcttcttcttggtgaatataacatgtgagtgctgttacacagacatttcatatagtgcatctccaaggcagaatcaaaatgtaactgataatttaaactaacagttgcattcttgcttatcttgtgtcttttatcaggatgttggattgtggctggagactataaatcttggtagttacagccaaatttttaaagaaaatggtgttaatggagaatacctggaaggcatgtccatgtttacgactgaacagatcctacgttttataagacggtgccacatgaagtggggagacttcatcacattgtgcaaggaattaagacggattaaaggtctctctctctctctgtctctctctccttccccctttaaacagtaaacagacaaacacttgtcaataaactcatttgaaattttcatctttacctatctgttttgtgctctttccatggttaggtaaggcatgatcattgatgttgtcacaatcagtttcgtactatttgaacaatctataaggaaacatgaatgtactagaagaaagattaaagtagacgtttagtattactgtattagagtgagataacttgcctataagttgttggtactgctgtcatttcattacagacaaccattaaagggtctcatcatagcacatatttttctatattgtgcagtatcaagacaatttgtgaattacattttctaaaaagtaatcgcttccttatatatatgtttttaggcactaaaaattttgtgattttccaatttgatttcccatttttttttcttttcaaattaatgttctcagaagacatttttctttacctgatgaaaaaatatcactaggtggtgcagttttcctttcttatttgattcctggagatatcacgagtttctctaaatgtaaagaattttctatttggtcctcatttagagggaccagatgaaaattttgtaatatggtatttaagaaggttcaaatgggaaaaataaaaaagagttaaattaatatgcattgttaggataaattcatattgtatgcttatgtaaaatcgttttacacggacaataaatatataaatcaaactcaacaaagaaatcatttggtaacaaacatgccctacggagtcaaatgagaatcaaatgtgaaatttgtgaatttttaaaaggaccaaaaacttaatcaaaccctatattattatataggctggagtcatccagaacttgattgtcaagacgtccattcctaaacatgtgatatgtttatatataaggagacatcaaaatatgcatatgcttcttctgtttgttgtgttgtgacttttcttgcaagatgatatttcttgtgacaacaacataaaaaagaagggggggagggaggggggtgtttacccccggtaaagttgaaaaaaatggctttatctgttaatgctcctaatttgtgaatgctatattgatgtctgtagtggcttgtctgaaaggggagcagaaggtgcggcggccatggtgggcaccggcttgcctatctacagtgttcttaaaggttgcaaaatccaacagacaatcaagagttgtttccttgaagctggaaccatgataatacaataagttaaacctctgcatatgtgtaccagtgtacgtatagcaaatttctttttgcctagaaaacaaaagataggaaagaactttttctagcccccctttttttattttattttattttatttttcttttgattccaaaacctggttgtttcttctcctctggagaactgaactgttatgcagtagaaggtccttgtgcactaatttccggtgctgtgtaattatgtattctcttatatgtgaacgaaaatacgatatatgccgtttctcttcaagttccaatacccgttatctttattcttctaatcatttgttcataaatttgtnnnnnnnnnnnnnnnnnnnnnnnnnnnnnnnnnnnnnnnnnnnnnnnnnnnnnnnnnnnnnnnnnnnnnnnnnnnnnnnnnnnnnnnnnnnnnnnnnnnnnnnnnnnnnnnnnnnnnnnnnnnnnnnnnnnnnnnnnnnnnnnnnnnnnnnnnnnnnnnnnnnnnnttactgtttaaagttttagatattttaagggcaaaaaaaaaaaaaatacagaaaaactaaaacgtaaaaaaaaaaaaaattcaagattatcaaagtatttacctttcattagtgagtagtgactggccactacggcaggcactgcctcatgctcatacgcttcattatcctcgcttatacatggctgcttgaaccgtaacccagcgtcagacgaaattggcttcctttatttatttcatcccttcgcgtttgttagttctttgggttacaacaaacggtttcgcattgaattctgagacttttataaaaaaacggtcatggctattcaaaaataaataaattacatataataattttttaatagtaattgcttttagggtaatgaataccacaatagcaaatacacaaaattaggacccctttcaacaattgtagtttttttttaaaagtcgacaattgtagttctagtcatgacaaatgctaataagtaataatgcgcttctttaacactttttttattagttgaaatttgctataatttataaatttttgtagattttttatttatttactaagtttcactcataattttataaataaactttaactaataatcaagagtttataagaataagtgagttagaaccgtcatttatattcatattttttatgagtgtaatttatattcatatatgcaatgcaacacccacagaaaatgtaagttttatgcatacaaattgacaagtaatttttgcttatatggttaaaattaagtcatatataaccttttaactagagaatatattttccgtatgaatgatatcaacactataatgtgtgcttatacttattttaaatatgaaactgataagataatcatatatattttataaattatttttcatctaacctgtctttttattgtctttgaataattttattctaagagatattttagcatctttataatttcaaatttacatgaacacaagtgcctaaagagaaagaattcccccttagcaaaaaaatgaagacgttatgagtgaaaattttattacacaaaaagtaaaacccgatatttggttccttcattttcttcattttccctctcgtgattcaaatggcgaaaaccccataaaccctaaaatctgccggtactgagtgatcatcatcatcatgttttcttgcggaacgaagaagagcaatgttcgctctcgcagagagcaaggtcgcgattccacggtggtagattctccggtcactcctgctcgaacctctttccacgataacgccgttcccaatcgcccgaccaccggcactcccgctccctgggttcctcgcttatctgttcttgccaggtattcattcattcatttcactttttcaccaaaatctgcatcgattcgctttctgcttctaactgttatccgttttcattgcgtagggttcctcagatcaacagaagtggaaaaggcgacgatacagatcctaccaaacctgttttcgtcggcgagtttccgcaagtggttcgtgatgatcagaacattttgctacacaagcgaattcctggtgagaactgtttgatttgtctctcaattgtgttagttagcacgtgtgttaatcccttcacatttgaagtaaattaagcttgatgtgtttgagattatgatgtaacgcaatgcagctgaagatcacgcgtgtggcgggattgacaagagcacatcccttgcttggattatttgtgggaacagggtctacctgtggagttatttgtcccctgcttcctccatgaaatgtgttgtcctcgagattcctttgaatgatgctgatgttggcagaaatgatgctggtagttggttgcttcgtgttgttaattgtgacgccatgcctgtgggaacgaataaagttgctaaacagtgcaactctgctgctgtggttttgtgcaattgtcggactcgggctgttatatactggccggacatctattctcagtcacacgctccggtcactagtcttgtgtcttccgatgagctggaggctgttatgactcctgatgggaaagcatccttcgacaggcagcggcgacaaagtaagctgggaagtagtttgagtggattgcacacatttaactctatgattgcttctgctgatcccagttgtaagtttgtatgtgttgcccttgtgtgtagctcgagtggtgaactttggcagtttcaatgcactcctactggcattcatagaaggaaagtatatcaaaatttccggctccaacagggtgaatcaggtcaaattgtgagcaatattgggtaccctaggtctctgacgtggtgttttccacatcattctattcaggaatcaaattcgcaattcttggtattgacagaccatgagatacagtgtttcagagtagagtttggttctgatatacctatttctaggctttggtctcaggcaattgttggaacagatgctgaggttggcattaagaaggatctagctggtcaaaagagaatctggcctcttgatatgcaagtagatgatcatggtaaagtcattaccattcttgttgcaaccttttgcaatgaccggattagcagttcaagctacatgcagtactctctcttgaccatgcaatataaatcagggttgggtttagagacaacaaatgacagggttttggagaaaaaagcccctattgaggtgataatgccaaaagctagagttgaagacgaagacttcttgttttccatgaggcttcggatagggggcaagccttcaggatctgcagtcataatatctggggatggaacagcaactgtctcccattattatagaaactctacacaactctatcagtttgatttaccttatgatgctgggaaagtgctagatgcttctatccttccttctgcagatgattatgaagaaggtgcatgggttgtattaacagagaaagcaggaatatgggcaataccagagaaagctgttatacttggaggagtggaaccacctgagagaagcttatctcgtaaaggcagttcaaatgaaagatctgcacaaaaagatataagaaatcttacatttgcaggtaattttgctcctagaagggctagctctgaagcatggagtgctggagacaaacagaggacggttttgagtgggattgcacgtcgaactgctctagatgaagaatcagaagctttattgaataatctattcaatgattttttatcatctggccaaattgataggtctcttgaaaagcttgaaacatctggttcatttgaaagggatggggaaaccaatgtttttgttcggatgagcaaatcaatcatagacaccttagctaaacattggacaacaaccagaggagcagagattttggccatggctgttgtttcaacccaactcttagaaaagcagcagaaacatcaaaagttccttcactttcttgccttatccaaatgccacgaggagctatgttctaagcagagtatgaaatttttgtctattcaccaaaagattatttgttttgatttgatcttcaaacaatttcttttacaatacttccatatgcaactcacttgtttgattatgtttaacttggtcattagtttttacattatttgggtatgtgatgtctgtataagcttaatttatctaccagcctgtttttataaaataaaatgaatcagatataatcatactttttaggatgatctcatacaaagtatatcacaagcaaaaatggagagtggtttttcactgatagcttattgacttttataaattgggtaaaaaaatgaatatgaatataatctcaattatcatccatctgctcctttgcctcagcatgtatgaaaaaatcaaaggaaggaggtttattctgcgactaaatgaattgaggcttaattatcttatttcttccccatagcctcacatagagttttaaaaataatgtaagcttaattaggtaaggaaggagtgaataaaatcctaaagcacatggattcttaattcttgatgtcatttgacttgttagggtgggattataagtgaaggcatgtttgatttatgattttgttaatggtcatgttttcccagccagtttttttaattgattaaatagattaaggttgtgaaataaataattatagtttcaggtaaaaatgcaagttaaaacaacacttagggaacagcaaatggacattccattactaaatgatgtttttttcaattcccaggacatgccttacaaattattttggagcatggtgaaaagttatctgcaatgattcagctgagggaactgcaaaatctgattagccaaaatcgatcaactaatgttgactcctcaaattctagtttgaatattcagatgtcaggtgccctttgggacattatacaattagttggtgagagagctcgtcggaatactgtccttttgatggatagagataatgctgaagtgttctacagtaaggtttcagatcttgaagatctcttttactgcttagatgcagagttagaatatgttataagaccagagcatccgttaggaatccagatccagagggcatgtgaactctctactgcatgtgttaccataattaggacatgcttcaactataagaatgagaaccgattatggtatccaccacctgaaggtttaacaccttggtattgtcaacctgttgtacggactggtatttggagtgttgcttctgtcctgcttcacttgttaaatgaaatatctggacttgataaaacagcaaaattagatctgtataatcatttagaagccctagctgaagttctacttgaggcatattctggtgctgttacagctaaaaatgagtgcggagaagaacacaaaggtctgttaaatgaatattgggagaggcgagatagccttcttgaatctctctaccaaaaagttaaagaatttgaagatactcacaaggttattattctatcttgcttaccgtatccttgcaatcctggtgtgggatagatatacattgttcaattggtcttttgtgcaggatttgattgaaggagctggagagcagaatgaagaggacataatgaaggttacttcacatctgttatcaattgctaaacgacatggatgctacaaagttatgtggacaatttgttgtgatgtgaatgactcggaattactgagaaatattatggtatgactatgattttattcttcattgtgcactgatgttgcttttattcccttttttctaggcatttgcaaattgcaatgatgattttcttagcttatcaacccaaatattctgttactgataaggctttaggattgagtagaagtctgctgagaaaaaataattgcactcctaaaacttaagtccataaggaagcaatagtagcagttacatccggacctagagctagagctaggacacaaaatgccccttaaatgaataaagatctattaattaagaaccaacaacaacctcacagtactaccaaatttgtagagctccacatattctttctttcaatttaagcctttatatattattggaaagagcttccaaagaaagattgtgcaaacaaatgttaaccaggtatacgaattttttttgaccatgttcttcaccatcgcacaagcacaatgcaacaccaattatttttatgaactttcagagcacaagacatacccataaaagtgtcttattttggacacggcacctgaaatgagttactagtaatagtctaaataagttatttacaattacatcgctgacacctcccaatgttgaataaaacctcggcctttcacacaaaattggttatcggaaaatgataatttatgatttctatttggtattatttaatcacaaggattctatatgtactatgtgttgccattttttttttttttttaaatgtattcttgcttatgtctcaattgtttgtgtgcagcatgaaagcctgggacctaatgggggatttagttactatgtctttaagaaactccatgaaagaagacaattttctcaacttttaaggctaggggaagaatttccagaagagctatccattttcctaagggagcatcccgatcttctttggcttcatgatttgttccttcatcaattttcctctgcttcagaaacacttcatgcattggctctctcacaaaacatgcaatctacttcagttgctgaagaggaaggagaacaggagtatatgaaaatgaaactaaaattgactgacagaaaaaatcttttatttctctctaagattgctgcctttgcaggtatggcaccatgtgtttttccatgtgttatggagactacttcctttctcttcattttatttaatatttctttagatgtcttcctccttctaactagggagaatttgaactcaatggccgggactctactttaagttttctgctatctctgataatatgctggattcttggttatatgatatatcagttaccaactcaacctaatggctgcagctttttgtcgcctttttacttattgttgcgaattggtgaatatctagattcttagaaatctttaatctgtgttagaatatattaaaaatctctaataatatcttgaatatatctttgaatagtttggagtatcttaggattacttcccatttttcattattatctcatgttttatttccatatttacatgtgaccaagcattatatcttgtccacatttggttgtggtattcaagtcattggataaagattggtgtttatattctgatttctttctctctctctctctctctctctctctcttttttatctatatgtactgtttcaactggacacaggtttagttagttaaatatctaatttttctttgaatgaatagatacctaataaatttcatttgcaataaataaaaaatattacgtttttttgttcaacagctggtaaagatgctggtactcaagtcaaggtggaccgcattgaggctgatttgaagattctaaaattacaggtaaatttgagtttttatttttgaacaattgataatttgaagagggagttgatttattttctcaatcattcatcgtgagtattaggcatccgtgaaactctaggacatcagccagtgtttgaaagctaacttgatatgttaggagcaaacagatgctgttgttactaaaaatatttgaatttttatttggcttatatatgaacttagtccgttcgcatctttttaattttggtccatgtaattttttttttcatttttagtccctgtcaatttgcacttttccaattttagtccctttaagattctgtttttagtccttttaaatttgtgctctaagggaataaaattggaaagcacaaacttacaaagactaaaaatgaacaaaaaaacttacatgaaccaaaattgaaaagtgcaatcttaaggaactaaaaaggaaaaaaaaaaacttacaaggacaaaattgaaaaaagttcgaacttacagggactaaaatttgtatataagcatttttaatttctagtcaaataatgatataaatacaacaacgacaacaaattttatctcactaggtgaggtcaactatagatcacatctcacatgatgctattctgcttgattagaaaccaaattctctagggttctatttatgatgagatccttttttgtaatttcctccattgtccttcttgaatttcctctaagtgtttctagtgactttctttgaaagtgtccaaattactttaaccaattttctgtgttcttttccttgataggtatcacaccaatatcttttcatctacactcattccatatcctgtcctttcctgtatagtcactaatctatcttgaactcattttggttactcccacctttttctcttatgatcttaccccttttaagacccagtgttatcaatggtggcttctattgaccagctaaaaatctgccgaaaaaatatggttgatggtgttgtggcatatggctgaaccatggcggccaccatagcctgccacaaaaacccaccatgcctctgccatagaatggtggcctgtcagaaatctaacctgtaatctaccatggtgctgccatgaccgctttttaacaacgttgtaaagaccaacattataaagtataattaatagttaattatattgaagcaagataaaaacttctctttgaactgggtagattttgtgatcacaaataactttcaataacatgagacaaatataattgcatgataagtttatactttatataatattataactatgtttaaatttcctctttaaaataagttgttaaatacacgattgaggggtttgatgtgacagttgttgtaggaagttaaattattcatgaaattgaagaggaattataaaaagttttagttttggagggagggaaaataaggagcctgctgaaggatttggcatgctattaaattgtaaagaatacacgtttgacagtcaaattgactgacttgtggcattgagtgttatgtgactgtatgagaataaaattaatagtttaatatttgctttgtttcatgagaacttgtttaaccttgcgctggcaaataagctttgttgcacccttttaggagtcctctttaccctttcttatttagatgctttacctgcaggaggaattaatgaaacgtcatccttccattgaagatagacaacttgttgaagctcagctgcttcatccagaagacttgattaaattgtgcctggaaggtgaagatcgagaactctcattgtcggcctttgatgtgtttgcatggactagttcctcatttcggaagatccacagaaaacttttggaggattgttggaagaaagctgctagtcaggatgattggagtaaattccatgattcgtacagaactgaaggttggagtgaccaggaaatcctgcaaaacttgaaaaatactatacttttccaggctacaagtaggtgttatggacctcaaagcgaaacatttgaagaagggtttgaccaagttttgtccttgagacaagaaaacatggagacttctattttgggggatatgggtagttcagtcgaaacaatcttgatgcaacacaaggattttccagttgcaggcaaacttatgctaatggcaatcatgcttggtagcgagcattgtggtgacatcagacttgaagcagggccttccccaatggaataacttggccaaggatcattccttaaccgtaatccaagttggtgtaggtttagtacatgacatgtagaatatgcagttgtttttgttcgctcctctcttccatgtattgcattcacaatcacaacgtaatcctggatgatattggtaaatggtgttggatagaagatatgcagcaagtacaaatccgcaaatattaaaagagatgcttcctgtatacgattttagcacaccattccggaaaccctgtttggtaaaagaaaaaggttgtgattaatattttttatatatataaaaaatacaaaacaaaagcgtgtcagaatggcgcaattaaaatgccttgcaaataacattgttgatattgaaatcacaattaattacaccatgtcagtataaataacatcaaatactaatcctgtaaacaaaaaacataaaaaaannnnnnnnnnnnnnnnnnnnnnnnnnnnnnnnnnnnnnnnnnnnnnnnnnnnnnnnnnnnnnnnnnnnnnnnnnnnnnnnnnnnnnnnnnnnnnnnnnnnnnnnnnnnnnnnnnnnnnnnnnnnnnnnnnnnnnnnnnnnnnnnnnnnnnnnnnnnnnnnnnttaataaatgcacctagttcgtgcataaacaatttgtacccctcttatagtaatttttatagaggaacagacgtatattatttcattcataatggaatttggtagaagacataagagctagcatacaaagtagatgttcttgcaagacaatgagccacaaaattgttggcctctttacaaaactccctaatgagttgttaaagaaattaaaaagatccctacagttaatgatgaggacaattaagttcaaggaccaacagaaggactagaagaacctatgatcggagaggagatccttcaacaagtggtaacaataattcttgaagttgtacatgcgttgaagaacattgaatcaaaattatttcagtgcatgattattattaaagactcatgagatggagggtgttgttgactctttttttagaattaaataaagttatactccttttatttttcgtttttttatttattttagtagttgatagctctgatgtcttttcatgtgcaccactagaaattaaagtcttcataattgacgttaatggtgcgcatttagaataattaaaggttgattgcctatatgtacacaaaattgcaatagaatggacaaacttgaatttccagacaattaattatgtattatgagaatgttatttaggtttcatgctgaacccgtttagactcattagaggttgcccatcacccttgtggcatcttcctttggcttatcttccattgttggagtgacgccttccacctgtcatcaaacgatccgtaattagaactgtgtcacttactgagaattgaagctaaatatgataaacctttgttgttattgttgaaaccatcaaccacaagcctgttgtccaacacaaaaattatattgttgttgttgctctcctttaaccattccctggcttggtataagccgaatgcttcaactactattgggtctggaacaccttgaaaccatgttgtttttgcttgaataaattgcccattgtgatctctaaaacacattccattcccaaactgttgatcttgattgaaaattgttgcatcaatgttacacttcaagtatccaaaagatggtttcttccactcacattgattgtttagaatctgcattacatgtgactgggattgctgctgtcttgcatgcttccattcttcaagttgttgaaatgcttgttgaatcgtgatctatgttggctggacctgattcctccaaattttatcatttcgttgcctccaaatacgccatagtgcagtagcaaattttttgcatgggtccttttcatgtagaaagttgatgatgtcaaaaatgagagggacaataccttctacagacaaaactttgctctgaataatgggccaaagttttgcttcttgccaagttgcaattgctgaatcacatccaaagaagatatgccaacttgactcaatgttgttttcacaaaattcacatgtgagtggacaaagaactcttttatctctcaatctactttgtgaagggaggcagttcctcagaattctccagattaaatgcttaaatttaggaggaactttcattctccaaagctccatatggcatggtgtatgcagtgcaaacaaaatattcttcatgtggcatgaatttccaaactcgcaggtcttcctctagcacgtgaagaagtggtatgcttctaatttcctacaagtcaacttcattgaagacttccaccatgaagtcttcttgccatgaacatctttgatgatctattagagaaccaacatgcatatcttctaatccttggggttgagccgtagaaacatatgggtagtcatttcttcgaagccatggttgtttccaaatagccatttagtttccatttccaattctccatttgataccctcttttatctcactctgaagcaaagatactacgccagacaaaactaggattatgctcaagtttggcatccagaaaaacaaaatcttgaaagtatttggctttgaaaacttttgtaacaataacatcttggaatgaaataaatttccaaacttgctttcttagcatagataaattgaaagcatggagacttctgaaacccattcccccattttcttttttaatcgttaatatgtcccaactcatccaattgatacttctctgcatattgtttttggtaccccaccaaaactagttcatcattttttgcaattcatcttctagtgaagagggaagaagaaatacactcatgcagtaagataaaattgcttgtgcacaagatttgattagaatttccttactcgtctttgacaatttcttgcttgtccagtgattgatccttttccacattttttcctttagaaaaccaaatacttctttctgcctccgtcccacaattgatggtagacccaggtatttttcagctcctaaactttgttgtaccccaagtgactaagatttgttgcttgcatttatctaaggtgtttgagctaaagagaactcctgatttatggaaattgattaattgccctaagtcttctccataagtgtccaagatatgtttcaaagtattaatctcattttcttgagtcttgcaaaacagaaaacaatcataagcaaataaaaggtgtgaaaaggtaggagcaccttgcacaccttaacaccatgaatatctcctgttctctcatattttttaattagactagaaagactctcagtacaaagtatgaagagatagggcgatagtgagtcatcctgtcttagtcctctcccaatagttattggtccaataggattctcatttaccaagattgaatattgcacagttgtgagacaaagattcatccaaccaatccatttttcatgaaatcccagtttgctaatgtcaattttcaaagctacttccccacttttccttgagtcttacatttcatgtggtggataatttctaaggctagcaggacattgtcaattataaatttgttttatacaaaagcagcttgttcaagagagatgcattttggaaggattgggttcagtttattggctaagatttttgaaattattttgtaaaggacattgcaaagggtgattggtctagactatttcatggtggtagggtttggacattttgggatgaaaagaatggttgtggagggaatgtaccttgttataaccaagaataggcaactttatgcactttaggtccaaggagatgccaaaatcttttgaagaatgttggcttaaggccatatgttcctggtgatttatcaatttgagcacgatattttaggcgcaattgcttccccctattattcgtatcttctatgcatgccttcaatttagtaagaaaatcattggacaaagagattgtccaactattttcaaccaaatattgaaaatttgggtccatcgaccattgattttcaaatctaaatcttctccaaaaatgttagaatttttgccatgaagcctcagtaggattggagagtgaccagactttgaggatattgtgttgagcagcctaaaattggggaaattatcaatccattgcccagttgcaagtgctatgtccaacttttcttcaatagtatcatgctttcctcttcttctagcccatgtataggtataaccttcaatagaaaggtcatggagattgtaataaatgataatctctttgaatcctctaaaaagttaattttgatgatcattgataccatatttttcatttaaaagtagatcattgaaatctccaaaaatgcaccaattactcaagtatgtgcaataacacatagaagattccatgagttttatcttctatcacgttcatgataaccatagaatccactcagttgccatttaggataaccaggaactttacaaaattttattttatcatcaattcaatcaccattcacgttttttatttttcttatcaaaaaatagattattttatttggatgacttagatgtctcatattttttagaaaaaacgatttgattgatgagattttatataatacttatgagatcgatgtaatttaaatatttattcttaaagcgtattgatttgactccataaatgcaattatcatcccataacatgttgccaaaaaaacataactcttatttcttcaagcaaaattccaagagaaatgaagttagatgagaattggagaatgcagcaatttaaaggatgtttcaaaagaaagcaatgccaaccacttcgatcannnnnnnnnnnnnnnnnnnnnnnnnnnnnnnnnnnnnnnnnnnnnnnnnnnnnnnnnnnnnnnnnnnnnnnnnnnnnnnnnnnnnnnnnnnnnnnnnnnnnnnnnnnnnnnnnnnnnnnnnnnnnnnnnnnnnnnnnnnnnnnnnnnnnnnnnnnnnnnnnnnnnnnnnnnnnnnnnnnnnnnnnnnnnnnnnnnnnnnnnnnnnnnnnnnnnnnnnnnnnnnnnnnnnnnnnnnnnnnnnnnnnnnnnnnnnnnnnnnnnnnnnnnnnnnnnnnnnnnnnnnnnnnnnnnnnnnnnnnnnnnnnnnnnnnnnnnnnnnnnnnnnnnnnnnnnnnnnnnnnnnnnnnnnnnnnnnnnnnnnnnnnnnnnnnnnnnnnnnnnnnnnnnnnnnnnnnnnnnnnnnnnnnnnnnnnnnnnnnnnnnnnnnnnnnnnnnnnnnnnnnnnnnnnnnnnnnnnnnnnnnnnnnnnnnnnnnnnnnnnnnnnnnnnnnnnnnnnnnnnnnnnnnnnnnnnnnnnnnnnnnnnnnnnnnnnnnnnnnnnnnnnnnnnnnnnnnnnnnnnnnnnnnnnnnnnnnnnnnnnnnnnnnnnnnnnnnnnnnnnnnnnnnnnnnnnnnnnnnnnnnnnnnnnnnnnnnnnnnnnnnnnnnnnnnnnnnnnnnnnnnnnnnnnnnnnnnnnnnnnnnnnnnnnnnnnnnnnnnnnnnnnnnnnnnnnnnnnnnnnnnnnnnnnnnnnnnnnnnnnnnnnnnnnnnnnnnnnnnnnnnnnnnnnnnnnnnnnnnnnnnnnnnnnnnnnnnnnnnnnnnnnnnnnnnnnnnnnnnnnnnnnnnnnnnnnnnnnnnnnnnnnnnnnnnnnnnnnnnnnnnnnnnnnnnnnnnnnnnnnnnnnnnnnnnnnnnnnnnnnnnnnnnnnnnnnnnnnnnnnnnnnnnnnnnnnnnnnnnnnnnnnnnnnnnnnnnnnnnnnnnnnnnnnnnnnnnnnnnnnnnnnnnnnnnnnnnnnnnnnnnnnnnnnnnnnnnnnnnnnnnnnnnnnnnnnnnnnnnnnnnnnnnnnnnnnnnnnnnnnnnnnnnnnnnnnnnnnnnnnnnnnnnnnnnnnnnnnnnnnnnnnnnnnnnnnnnnnnnnnnnnnnnnnnnnnnnnnnnnnnnnnnnnnnnnnnnnnnnnnnnnnnnnnnnnnnnnnnnnnnnnnnnnnnnnnnnnnnnnnnnnnnnnnnnnnnnnnnnnnnnnnnnnnnnnnnnnnnnnnnnnnnnnnnnnnnnnnnnnnnnnnnnnnnnnnnnnnnnnnnnnnnnnnnnnnnnnnnnnnnnnnnnnnnnnnnnnnnnnnnnnnnnnnnnnnnnnnnnnnnnnnnnnnnnnnnnnnnnnnnnnnnnnnnnnnnnnnnnnnnnnnnnnnnnnnnnnnnnnnnnnnnnnnnnnnnnnnnnnnnnnnnnnnnnnnnnnnnnnnnnnnnnnnnnnnnnnnnnnnnnnnnnnnnnnnnnnnnnnnnnnnnnnnnnnnnnnnnnnnnnnnnnnnnnnnnnnnnnnnnnnnnnnnnnnnnnnnnnnnnnnnnnnnnnnnnnnnnnnnnnnnnnnnnnnnnnnnnnnnnnnnnnnnnnnnnnnnnnnnnnnnnnnnnnnnnnnnnnnnnnnnnnnnnnnnnnnnnnnnnnnnnnnnnnnnnnnnnnccttttcttaaggcatatttaagaaaaaaattaattccatgacatgaagtcctatataatttaatatatccttaactttgaaattccacgcatgtttaatttccgacaaaaataaaacctaaaataatttccttaaaacatttgttgtgtataaattttaacactatcaattaattataaatcatctttaatatgattttaaaaataattatcataaaaattcaacaaatttattatatataatactactttgtgatttttttgtgaagataatattttgtgattaaataataatctgaaaaaattttacacaccattgatgtatatattatttattttgctaagaacttattgatttgagtgaaattagatttcgtttttaaagtaaaattttattcttataaatgaaaaaaaacgtaatcagaaaaaaaaatcacaacaccaacgtcataatgaaaaaagaaatattgtttattctattttgggcgtgcaatgtatcgtgaaagaattctagaaaccatgcaaatgacgtgtgaagaagaaatttggtaatagtaaattgccttataatttccaaatgggtgggggttgccggcatgtggccgataaaagattaaacataaaaatttgcgtataatgggcaagggcaagggcaaaccactttttctccaccctgctacgcgtttatgccttggaatcgtggcagattcccattgatccatgataaaaactcatttaatagcagcgatacccttgagttttattatatttgctacgtgatcctagtcggacgctataaattgaccatctttgttggcttgaaatcatcaaaatctaatttgagcaatcactaacctttctctatagtgtctgtctttgacacttgttccgtgttatactctcatctagttatgctatttgctagagagagagagagatatgaagagttgattggagtgtaacataaccccatcatgtgtaacataattccttgtttaaaccacgtgtgtgtttgtgtgtgtaattgcaagatgatatgagtgtctgaaaaccctctagttggatcttgagaacaagaaacgtaggctttgttccggttgaattacagtccaatcaaccattgtgtccaaataacgaattaagtgtcacctttctttttcttccttttctttttatcaataaaccaatcttatctcattaactgtgacatatttaagacatgtcccaagcaacctcgtcctcagctggtggtggtgatggtggtgccaacattgaacttggtgctaccttactcctcaccacaaccggcaacagcaagtacaccagaatatggcgtagaagtttatacataagattcctcatctcagtcaagaagtcaacaacttctaccgacaaccatgagtcgccacgatcactactttcttcagtaccgtacacttcagtacctcctgctagaacctcctcttccaaatcttcagttgcaattgatatagaagaagaagaagaaagagaagagcacattaggagtgatattgctcgaattgtaaaggagaaggacttgaaatccctcaatgagcttggtggcgttgactccgtttccgctgtccttggtcgtcaacatcaatactcaaaggtatatatcaaccttctcccctcctcatattcatgcccttttcttcaacaataaaaacaaagaaaaataatgaaacttgggttatcatgttataggtgtgattcaccaacttagctgatgattaatttctaccaaagaacctgactgatcacttttagtgagatatcttctctcaattatgttttttcatccacaaaactcgaattcgagatcttgtttaaggaatctgagctcagttccgttcggaccaacaacttcttgctaaactcctatactatatggaaaaacattaaagagggagtgattcttttgttttttcatccacatggtggttatgatatttggaggatcccttctagtttaaaccatcaaatttctcggtttattgaagtgtgaagaaggatggatctactaactgttgtttgtggtgtgttgagatagatgtgttttgttgatgggattttgtttttatgaacagggcaagaccactataccattaccagttcttggaacaaacttgtccaaattttttttcaacagctgcaagttctaccgctgcacaattttggtgctgttcgtctccgctgggttgtcattcgccataggattcaagcaggagggacctaaacatggttggcatgatggtgttgctatagtttttgctgctttactactggttgtagtaaattcagtagcaaacttttggcgtgagaggaaaatgttgaaattggcaaagacaaaggtcgagttgcaattcagggttaagagaggtgaagagatcttaatggttcccatatctaatattgtggttggtgacagagtatgcctgtggccaggtgatgaggttccagcagacggtttgcttgtaagtgatggcatccttatgctggctgagcctgaggcaacaaaaagtaaccatgatcccaaggggaacccgtttcttatatctggttcaaaggtgattgggggccagggaaggatggtggtaacatcagttggaaccaacaccaatttggctgaaaggaggggcttgtttgagcaactaatcgagaagccaatttcttacgttgacatagctgctctttttatctctctactggttttacttgtggtcttcgttcgcctaatttgtggaaaagatgggaacaatagtgggttgccagaaatgaaggggaaggtctcaattggcttgttgatgaaggcacttcagagagctttcttgagaccccaaggaacggtttccactttaacacgccttgtcactgttgcaatactatgcgtgcagcatggaatgccacttgtggttacaatttctctcaagtaccagatggataaggtagttccaaaccaagatgctgttctaaatgatttatcagctagtacgacaatggggttggtaactgtcatctgcattgatgtatcaggtgagctcatatctaaaccaatggaggttagcagagtatggatgggggagaaagatgtcagcatggttgagggatcggaaatagataaaactgcgcttgacatgcttaaacaaggagttggtttatcagtccttgcaccagagatttctctttcctctttgtctaattcacttgtttcttgggcaaaaacaacattggaagtgaacttgagatctttcacagaagagaaatttgacattcttaagcacagcaatctgaattctggcaaagaaggtagcggagttttggtaagaaaaattggggacaatgaacaagttctgtacatgcactggagtggagctgcatccacaatattggatatgtgttcactgtactatgatagtataggggaatgccatgccatggaaaaccaaaagatcaaatttgggcaggtgattgaagagatggaggatggtggccttgagccaattgcttttgcttacagacaaacagatggagaagaacttgagaaagaagaactgatcttgttaggactgataggtctcaaatgcactactagtctagaatccataaaatcagctttggaaaatctgaaaaaaaatgatgcaaatatacagatcaaactggtctcggaggatggcatcatagaagtgaaaggcatagcttgtggactaggactagaacatgataatgtgcttgaaggaaaagagcttcgggatttgaatggggaagctagattagacaaagtggatcgagcccatgtaatgggaagcttccatcctaaagacaaacttctcatgatacagtgcttgcaagagaaaggtaaggtggttgcattcgttggaacaaggttgatgactaatcatacttcagttctaaaggtagctgatgtggggatagttcttgatcctctgagaacaatagtggatatagatagttgtgacataacaatcaaatttttcagtgtattggaaccaattgtgatggctggcagaagtcaataccacaatattcagaagttcattcaacttcagctgacatgtaccatatcagggtcagtcataaccttgattacaacatgtactggagattccccccttgcagcatcccagttgatttgggtgaatgtcttgatgtgcattctgggtggcctaatgatggtattgaagctaaccggcgaggaacggattgctaaacaaccatctgattataggaaccaacatattataaccaaagaaatctggaaaaacattgttattcaggttttatatcagacttctgtgtcaatgatacttgagttcggtggacatgttactggcaaggataaaaaggttagggaaaccatgatcttcaacacattcctattttgccaactctgcaattttctcaacaaccaggttctgaagatggttgttcagagcttctatttcttggtggccttagttggttgttttcttatgcaagtgctggtgattgagtatgctaagggcctagcagattgcatgcagctgaatgctacgagatggggtatctgcgtcttgattggtgctcttgcatgcgtatttgaatggaccttgaagaatattcttccagttattctcaatcccagtaccaacattgcttcggaatcaattacttcaccttcgttctatctttctccagtatttccaattctgatgttcattctgttccctgtaggactaatttttagtcaaataggcatgaacatgacaattcgttagtgaaggcagatcagcttgacacgcccaacgactttagtcagtgtataaataatgttgctgcatatgtaatgttaatgtatgtattcatttgtggcagttcctttctttgtagtcattgtagaataatcatttgcttgtactaccgaatgtagataagcttcattgattccccatcacttccctacagagaattaatgtgaacgttagcgtttctaatctattattgtatatattttcagtagaacttgtttctgtcaatgtctccataactcaattcccatcctgtgcatcacttgtcaagtttgctttataaagtcttgtgataataataacgtagaaagtgaatcacaaattagcttagccgtatgaattttgtagctcagttggacttatttttcttcttttatatactctctttaaaacttttttgcatgtccccgaagttggaaaaagtagaaactatatatgcatgttaaatataagtgaaaatttaaaaataaagcaaccaattaagcaaatttcatatgcatgttaaatatcagagaaaatttaaaaatatatatacccaacgagaatgaaatagataaaagcttactttagaaataacgaaaaaagataaaagtttagaacaaaaaaaaagttatttttttaaaggcaaaagattaaattaaatagcaaatgaagataaagaaaatgaaaagataaactaaattagtttagactttcttggctaaagtgaagccttagagtacaaattcatcccccgaaagctttcaagtaagccgaagttacctattagcttcgtttttcatgcttccatggtaaaaaaaagtaattgcagaactcctttcagtatatgagctcgaattaattgggtgccagatatgctaattaattacttttatgatgcaggcaagtgtgttttcagatggtgttcgggatgatgttgatttttataagtatgaactgcactcctttagctttgaagtttgatcattggtggataaattatttatattttgagctttgaaaatgttccaatgaaacttcattcacactttctgtgaaaaatatcatctattaaagaactgtgtttttatatatgaactcttgtcgtggtcaatgctatacatgacgacatattaactatttaaaagataacttaaaattataaatagttacatattataaaatgctatagtggacatgttaccacatgtagaatttatataataaaattgaatctataacnnnnnnnnnnnnnnnnnnnnnnnnnnnnnnnnnnnnnnnnnnnnnnnnnnnnnnnnnnnnnnnnnnnnnnnnnnnnnnnnnnnnnnnnnnnnnnnnnnnnnnnnnnnnnnnnnnnnnnnnnnnnnnnnnnnnnnnnnnnnnnnnnnnnnnnnnnnnnnnnnnnnnnnnnnnnnnnnnnnnnnnnnnnnnnnnnnnnnnnnnnnnnnnnnnnnnnnnnnnnnnnnnnnnnnnnnnnnnnnnnnnnnnnnnnnnnnnnnnnnnnnnnnnnnnnnnnnnnnnnnnnnnnnnnnnnnnnnnnnnnnnnnnnnnnnnnnnnnnnnnnnnnnnnnnnnnnnnnnnnnnnnnnnnnnnnnnnnnnnnnnnnnnnnnnnnnnnnnnnnnnnnnnnnnnnnnnnnnnnnnnnnnnnnnnnnnnnnnnnnnnnnnnnnnnnnnnnnnnnnnnnnnnnnnnnnnnnnnnnnnnnnnnnnnnnnnnnnnnnnnnnnnnnnnnnnnnnnnnnnnnnnnnnnnnnnnnnnnnnnnnnnnnnnnnnnnnnnnnnnnnnnnnnnnnnnnnnnnnnnnnnnnnnnnnnnnnnnnnnnnnnnnnnnnnnnnnnnnnnnnnnnnnnnnnnnnnnnnnnnnnnnnnnnnnnnnnnnnnnnnnnnnnnnnnnnnnnnnnnnnnnnnnnnnnnnnnnnnnnnnnnnnnnnnnnnnnnnnnnnnnnnnnnnnnnnnnnnnnnnnnnnnnnnnnnnnnnnnnnnnnnnnnnnnnnnnnnnnnnnnnnnnnnnnnnnnnnnnnnnnnnnnnnnnnnnnnnnnnnnnnnnnnnnnnnnnnnnnnnnnnnnnnnnnnnnnnnnnnnnnnnnnnnnnnnnnnnnnnnnnnnnnaaaaaaaaaaaaaaaaaaagaaagaagaaaaaaatgtaatgagtcactcacgggtttgcactgttactgtagcatcagcccaatccaaactatcttccataccaatttccaagttttaatttaaatttcttgactttgttggacctgaattctgtggcttacattgaccctctcgaaaacatctgaggaaggagatctttgcatccacgtggcagaagaagagccactatagtatgtcgaaatatcagcatgagaatccacatccaaatccacgaccaatgaggtgttgctgagttgtgcatatcctgatccacaatatcatacgatcttctataaacctttgtagtagccttcttcattctccacaacacagaacaaaaccaaaggaaaaaagccttagccaacacaaccatcatggccacctctgctattcagcaatcagcattcgctggtcaaactgctctcaagcaggtcaatgagttcgtccgcaagaccggtggcgccggcaaaggtcgcactaacatgcgccgcaccgtcaagagtgctcctcagagcatttggtaactcaacattacccttcccactccactagttcaacttagtattacatgttttaatataatactcgcttgacaacataaattaatactagtaattccgcaaaacttagatgcaataccttttgtttttggtattatgttctacttcttccgtcccattataattatagtgtacgagaaaaaaaaaaattattctataataattgtcattttaatttttatctatttattattttatcttggtatatctaaaagaatctttagacgactattaatttggaatggagggaattaaaactggagttttaactcactaattcatgtaacaaaagttcgcattatatgttacgattatcaatgcggtaaaactccaaaaaagcatctatagaactatatctatgttttgtacttaacaattctcagcaggatggggctaactagaaagccagtgattatgcaaacataacagattaagaatagttattgtattgtcttgtaaagataaaaaaaaacaacatcagctaactaacacatatgaagctaggttttaacaatttgtctgagaatgtaactgactttggatgaggtgttgtgaaaaacaaaacaggtatggccctgaccgtcccaagtacttgggtccattctcagagcagattccatcatacctgacaggagaattccctggtgactacggatgggacactgctggattatcagctgacccggaaaccttcgccaggaaccgggagctggaggtgattcacagcagatgggcaatgcttggtgcccttggctgcaccttcccagagatccttgagaagaatggtgtcaaattcggcgaggccgtgtggttcaaggccggttcacagatcttctcagagggaggacttgactacttgggcaacccaaacctgatccatgctcagagcatccttgcaatctgggctgttcaggttgtgctcatggggtttgttgaaggttacagagttggtggaggaccacttggtgaaggactagaccctatctaccctggtggtgcatttgaccctcttggtctggctgatgaccctgatgcattcgctgagttgaaggtcaaggaactcaagaacggtcgcttggctatgttctccatgtttggtttctttgttcaggctattgtcactggcaagggccctattcagaacctttacgaccacgttgctgatcctgttgccaacaatgcttgggcttatgccactaactttgtccctggacaatgaggatgccaacattccatgcaatcttctgctcccttttgcagttaccttgcgtttaactccattttcactaatgcaactacacctgtgtagcagaagaatctgtatgagaaccattatatttttatatattagaaatttgggtccccagaaaatatcaactcttacgtttggaaatcagaatattgattggtttgtgtttttacatattgttttctatcttcccataacaggaaccacctttccctatatgttaattagttcaaacattgaaaccatgttcaaggaatctatctattagtgatgcacgtgccttgtacaccatccaattcaaagccatgattaaaaccataaacgaatgaatccatcttccattaccaacaacatccaaagcccagaacaagagaaagagcaggcgggcattcaatgtatccatctaaatgcgtcaataatgtagtcagtcatgagaaaattcaaaaacaaagaagtgatgagggggaagggagtaatgcaaaagctatgatttgaaaacaagaaaacaacatactcttgcttaccactttctttttactcatttggaaagaatgcaaatagcatacgattttagatttttttaatctcccatttcttcgtgaaatcaaatcatgaattacttctgtttttacaccaatttctttctcaataataaccttctttttttaatttttttttatcggaaccaatgagaatgtaaagcaacaaattaaaagttctgtgttgcagcgatatgttttggtgtacacaaaaataaagtttgaacctaaactgtcttgcaaactacttaaacttaatgaccctttcattataagttgaccctagtgaattatctattgtagtaatctaatttaaatacccttccatgctaaataaaaaagaaaaataatcagtaaggattatttattcaatgtttattgttttagttttacaaaaaagaatgttaatttagtaataaattaaatttctgttaaatataaatataattaataattgaataaattaataagttacaatttgtgtgggatttagggattatactcgaggttcgggaagggtgactcaaattgaagttcaccgttttcacttttctgcgtggacgtgagtgtgtgaacatagctaaacatctcattcctttgaaaattattatggcttctcttctggattctgcttcttgttcactgtaactgctcatcatcacaaatgtgcattctcttccggttattcttgtttgtgtgccaaagcttgaaatttttttgtccttcattttggatccagagtgcttgtttgcttgagcagagtcttaaaaggctttttttttttagttcagtgttctgttgctggcatttagtgtaacaatctttgtttcgcagtgcattcaggaatattgaacataactttcattggatttaaatttttgtcagttttatatgcgtaattgtatatttttgttgttgtgtgtctataatgatggcactgatattcaaacctatgatctcatgcacactattccaatccctcaccactaggccgaccctagtgggttctgcgtaattgtatgtggtaatattactttttgtaataaaaattagtgatgctttacttcccattctaatacatgcatttgagcttttttaattgtattttccaaatctattcttattctgtgttttttggccagtagtaagtaactagctttccagattgggcaagaagagagcgacaagaagaaacacgaaaatgtttttccacatagtgctggagcgaaagatgcagctgcatcacgctactttggttgtaaccttcgtgataatcttatttccaaactaatgaaagatgtggaaggcacttgcaggtgattccccttaagatcctttcaatattttcttttccactagaaaatgagttgtgctaaaatgggaaagaagataaaatatgcgagttaatcagttaaccatactatttctcttatacactccctgaacgtaacttgagtcctttgacaatgataagcttttcaagatgcttgaagttgtgaaagttagcagacagttacccaatgaataagtgctaactttgtcttgggtttctctctcttattaaacttaaagaaacaatgaagcatgaaataaaagtacacttgaaaggccacctcaagatagaaacatctgcaattgcaataaagtaacaccaaaataatcacaataccccaacctcaagtaacaaggactcaattccctgagttaagaacccttcatctcatccttgccctctggcacgagcctttgatttttacccactacccagtaatacatgttaataagagtaatttttcttgtgcatttgtttggaccgtacataatttagatcagagaaaagtatttatccttaagtgactgatttggaccttagatggatgtaacatttggattttcaattattatgcagtggtagacatggatttgtggtggcggttacagggatagaaaacatagggaaaggcttaatttgtgatggaacagggtttgtgacatttccaattaagtaccaatgtgttgtcttcagaccatttccaggcttaattcgtgatagaaaacatagaagctgttgttaccatggtgaacaaggtttatacagttcctttctctttagagtaatcaatctgtgtaactctaacttctggagattttggtttacgactgttgagatctgtttgtgcagatgggatttttttgctgaagctggacctgtccaaatcattgtttcaaaccacataagtttttgtcttttgtaatatttgagaagtagtctctattatctccatgttatatatctaaaagattgttaccaagattgtcagaatcgcgattctaagtaaactcgtggagacttcgtaaaattgaatcgtagaatcataagagtttacttcagacaaaaaaaaatagtaaattacctatatataaatatgaaacaatgacataactaattttgtcaaattaaatgagtgcaattataaataaggaatactaaaaaattcataataacaattgaagtattaaagttgataacacaagtaaagtgtattaataaaaaaagagtgtaaatagaaattacttaaattaaaacaaaagtccaatttttaatataaaaaatgagccagaaggtgtataataagcaaaaaaggggtgtaggaagcaaatccgttatgcatctggcccaactatgaaaaattgctattcaaaacgatgtcgttcctaaatccagtagactcgcgaaaatgtagcagaatcacgattctactcaaaatcgaacgattctatgtagaatcgtgtggttctactccgaaaacgagtctacgtccgatttaactcgcagaggggtagtagattcgtaaaatcggacgattctacgatttaaattgagagtttgataatcatgattgttactattgttcttcattttgaatattaattttttttcctttattgttcctgtcactggaatgctaggcaacttttcaattttgaaagccaaaattatgtttgttatttattattgttgctattggaatgcaatgcaagttttttactgtcaaaattttataaatgaggttttgggttacatgattattttgggcttgggagcctccattcctccaaattatcacataggggcttgggagagtgggaatgacaggattttgggctaggataggatgaccacatgtagataaattcatttaaatatatatatttatttattattatgtattgttatatgggatgcatgtatccttatcatatacctgtatttgtacccatacagcatgggttaaggttatgcctatctgatttcttttccaagataaatgacttttattagcgtgaagatcttgaccatgaaatgaattattcagctcgaaacttaattatgtaatggacttctgtaactatttaatgtaacagttttggggccagaataaagatgattgtgcaaatttgagattggccaaatagaaaaaggcggtgcatgattccagttttcataaacacaggaaaaattccttgtattgtttttttttttttaaaagagatgatcattgtcagccaattattccttgtattggtaatgtttagaattaccgaggattattttctgttccttttctttttaaattaatttaagatagaatatgccattactttgcaatggaaaattttcaacttgtagttgtacttttacctttatatatatttttgtttgttatgaccctttttgccccacttagttgattccgggtgatatggagttccagtctggagacatgccaaattacactactacttcagatggatcagtatgtctcatttataacttcctcaatggaaaagaagagagcaaattgttttttttgtcttgtttttttttattttatgataatttttactacatcaattggtcttttgcaagttaagattcaaaaagatactgaagtgagactaaagataatcgggactccagtggatgctactgaaattgtacttctatatatatattatgtctcttcattttgttgaatgttgttaagctccattacctttatgctgctgctatttttttatataggtaaatgttagttgttagttttgttagaatgttagtgggagggatttgaacccaccacctctcccttctcccttcacctacaagtcaaccttataactcctagctttatgctaaattctgctttgagaaatttgaatgaataggaaagcatttttagctcattaccaaatatagcttttgtttctccacaaatttctttactattataaattcctcccagaagagccttttagtttttgctaattttaatatttagctcatgatcatcactggcttcgtcctagtatttgtgcatatcatgaaatttgtggaggaatttataataataaagaaatttgtggaatgctagtttatgctccgttagctagtaatttactgtgttggtaactcttttgtcactatttaaattttatccatttcaaaagttatccacatggaatattagggttactaccaagcaaagttatttgctaccctgagggagttataaatttaccgtgtgctttggtggtatgcaagaatcattactattccatggtgcagctttacttcatttctaaaatcttgaacgttgtgactcacaaaagttgtgagaaaattgtgatcacaaattctccagttactgcatgcaatgagaatgataatatgtttaccacattgttgatgttacatgtttgactgtattgttcctgccatgattattgttgtatgccatgtgtgaacatgtcttaaaagaacacttgtctatggccttgtagcctaatggaagttttagcgagcatatgatactagtttgtatgctaataaagttttaatactcctgaacatgcttagcctatgnnnnnnnnnnnnnnnnnnnnnnnnnnnnnnnnnnnnnnnnnnnnnnnnnnnnnnnnnnnnnnnnnnnnnnnnnnnnnnnnnnnnnnnnnnnnnnnnnnnnnnnnnnnnnnnnnnnnnnnnnnnnnnnnnnnnnnnnnnnnnnnnnnnnnnnnnnnnnnnnnnnnnnnnnnnnnnnnnnnnnnnnnnnnnnnnnnnnnnnnnnnnnnnnnnnnnnnnnnnnnnnnnnnnnnnnnnnnnnnnnnnnnnnnnnnnnnnnnnnnnnnnnnnnnnnnnnnnnnnnnnnnnnnnnnnnnnnnnnnnnnnnnnnnnnnnnnnnnnnnnnnnnnnnnnnnnnnnnnnnnnnnnnnnnnnnnnnnnnnnnnnnnnnnnnnnnnnnnnnnnnnnnnnnnnnnnnnnnnnnnnnnnnnnnnnnnnnnnnnnnnnnnnnnnnnnnnnnnnnnnnnnnnnnnnnnnnnnnnnnnnnnnnnnnnnnnnnnnnnnnnnnnnnnnnnnnnnnnnnnnnnnnnnnnnnnnnnnnnnnnnnnnnnnnnnnnnnnnnnnnnnnnnnnnnnnnnnnnnnnnnnnnnnnnnnnnnnnnnnnnnnnnnnnnnnnnnnnnnnnnnnnnnnnnnnnnnnnnnnnnnnnnnnnnnnnnnnnnnnnnnnnnnnnnnnnnnnnnnnnnnnnnnnnnnnnnnnnnnnnnnnnnnnnnnnnnnnnnnnnnnnnnnnnnnnnnnnnnnnnnnnnnnnnnnnnnnnnnnnnnnnnnnnnnnnnnnnnnnnnnnnnnnnnnnnnnnnnnnnnnnnnnnnnnnnnnnnnnnnnnnnnnnnnnnnnnnnnnnnnnnnnnnnnnnnnnnnnnnnnnnnnnnnnnnnnnnnnnnnnnnnnnnnnnnnnnnnnnnnnnnnnnnnnnnnnnnnnnnnnnnnnnnnnnnnnnnnnnnnnnnnnnnnnnnnnnnnnnnnnnnnnnnnnnnnnnnnnnnnnnnnnnnnnnnnnnnnnnnnnnnnnnnnnnnnnnnnnnnnnnnnnnnnnnnnnnnnnnnnnnnnnnnnnnnnnnnnnnnnnnnnnnnnnnnnnaggtaaaatagtaaaatttgtttctcccttacatggtataaaagctctagattttttttctctaattttatttttattattttatattgtgtgactgagactcttatcttacatgatgctttgcacggatttagtgttctattttaaagagtaaaaaagttactcctcatttttattatttattttcttacaatttaatgtttattcgaataactaatcgtaaccgttaatatttcactgaattgattaagcatataagcatatataagcacgtattcttaagatatgtgatgaaattttatatccaactttaccatccaactaaactagccatattcttactcattctttaattggtactcaattgtaagagcaacaatcattgcatggcttgtcttctaacacttaacctactcatttcttccaagtttacaagtcaaatcaaaacccatataaaatcatttaactaaacacaaatcaattcaaagaccacaacttggtgcatataaccaattgatactccacaagaccacaaccattaaaattgcaaaaaatatctcatctttaaagataatcccatcatggatatacattgttagctccactgaacccattcacaacccaatattcaaatttttcctttcctaaagactcaatgttaattagaagaatggtgaacaatccagcatttggtcaagaaacaatcaaattcgttccaaacacaaacttgtatgaaggctaccaagttacagttacaggttatagatgaaaaaaatgagacatgaatttagcaacttgccaggttaaaatttcacaaaactaagctttatggctttgtatcaacccaaaatccacaaggaaaaatatggaaatttattacaactataactagaatttaaaagtagctagagtgtatcgttaaacaaaacatatgcttacaccgtagattgagttgtctgtctttccttcatggacactacattaggactaatttaatcattgataacaaactccaaaaatattccttctctattccttttgtctcttgtgcacagcaccacactctccctccagctccaaaacaagaatagtgcattcaacagttaatgcttattaaaaagggggggtattataccagcaagatcaaacaaagaagtaccatctcctcccagataagcattgcattacctaaccatttattctccacaatactcccttccaaatgctactcagcatcatcaatttggactctacctctcacccttttcctccttcaaaaagtccctttggccacacatccagcgaccctgctttcccctatactaacttttagcaattatctatttggcatgttctccaacagcagtcgattctaatctctgttgctatcatcaggaatcaataaggagccaaatgaataaaataaacgatgaacagctaaaaatgattatctcctatacatgcacttccaaaccactacatgccaaaccccaccaaaatataaagaagacacctgattgaaaattttactcactgccaaatgggtaggcaaggtaatgatcctagtcctaccactgtgaactcctccattgctcttcttcaagaaaggtttagacagttggagaaggtgaaagaaagaagagaggggaaacaacttcttaaactcttgtcatctgagaccacctcctcatcatcacaaaactctcaacaacaaccaaggttggtggctccacataggccaactctccatgactctctttctcttggcctcaacttcacaaacaagcaagatggtcatcacaacaccatgaacacgaaaccacctccatcctcgaatttatggccacagggagcatcaacatcaagaaattttgatacctcagacgttgatacttcccttcatctgtaaataatttactactgtttgtcttaatttgcttccccagctagtaccttgtataatagatgcataataaccctctgttcgacctccatcattttgtatcaataatcaaggaggatttgtatcagttatgcttttctttttcccccttgaaggtatgtgaatgacatatgacattagtaattgtatatatctctcctaaataaaaataactcggcatatttataggccagaatacagtactttgcagtggcctgatcgatgtcaagaaggcagtaatgaacgtaactcaattgtagctggactttatttcacagaatcgtgttctcttcaaatattaaattggtatttgatatatcttggatgtttaatactactgtaatttaatttgtattctcttattttagagaagaaaagggtagtaccaaagttacataaactcgtatataagttattatcaagtgacaaattgatataaattaaaataatcttatcggcgtataatttaatttaatacttttattacaaaaaagtactacctaaagtaacatacacgcatatatgaactgtgatttagtgatatactgatataatttttcttttttgcataagattgaaaatttgatccattcacattaatccaatattattttgcatttcattgaaaacaaaaaaaaatgtttttaagacagctaaaagcattaaacattcttattgtatatttattaaagtttcaagcttttaaattgttttaaaaaaatcagtaataaattatatgtatttagtttaacgtattttnnnnnnnnnnnnnnnnnnnnnnnnnnnnnnnnnnnnnnnnnnnnntataattgctatactgatcaaaatcatttttttaaataaattttgtagaaacatgaaattatcatgctctactccaatatcaaatcacctacttataattatgtctaaacacgtgcgttgagacatacaaacacgacaattatattgtgctctttatttatttggcagtatcccaaggtggctttagttggacttatatatttcttaatatattcttcagaaattaaaaaggtagaaactatatgacatgccatactgatgatatcttattatatttataatttttaaaaaatatttggcaatattttgaatttaaaaataacaactaaattctgatatttattcataagtacttaaacatttttcaaaatttaagatacatcactaacagtaattttttttcattaagtacaatcaattacaagaattgagtaaatatctacaaataaatcattaattaatctttttatgtgcaccaaatatatttctctaaaactattaaaaactttgcttagtggacaactcttaagaaaattcttagacgttgaggatctagttgaataattacgattgaataaaattgtatgtgatttaaggttgtgcagtaattctctaattctcttaatagatctatgttaacaattcaatatatcattggcgtgtttttctgttatactaaatgtttgtaaaaaaacaatctcaatacatttggatttattttacattcttaggtatgataggaagcaagccttttacactaaaataatttatataagattcgcaattccaattttggttcaactctatgcattatacatttatacatatacaatattggagtttcactctttcgattttttactgtacactaagtattgttggtgcctcttttttttctaattttattatttcttcgaacttttattgaaaaacttatgcctccaattcaataatcatagactccatccaccacccaaccaagttttgtctgcttgacatataaccgacaggacaacgggcctggctgaatgctaatgggcctggcctcctgggccattgcgaaagcctcctttctcccaccatggtcatttatcaatgagatgttcttttccaatctttgttttatttattttgaaagaaaattggtctcaactctcaagagacaagaatatcatcgcaatgaaagttttgattaaaaaatgtaatttataaatattattattattatgctaaaatatatatttagtattcattgaatatgaaaatgtttaaaaataatttttgtaaaatttataatatatttttcgttctcataaaattaaaatatcattttttatctaatataaattgaataaatccaaacctaggataataaatttttacatgaattattatataattaatataaaaatttaacattttttatatcaattatatttataattgatataaaatataatattttttataagtttaaatttatctaaacttatctgagttaaaaaataatatattttaattttatgaaaatgaaaaatatattgaattacaataaagaattccgaacacttatatacttagaaggaggataaacaaattataatagtcgtacaaattaagtaaaaaagaaacgaggcatgaaaaaaagaaaataaaccgaaacgagaaatatattgttgagggaagtgtggaaacgacctgcatcgagaagcttccaaaacgccatatttcgatcgaagcaagcaaaccccttctaaaaccctactaccatattttcttacaaacaaacgcagtttctctctctgtgtctctctctctctctctcagttcaattcaattcaatatgatgcagagactctcttcttctactactactcgctctgccttgctgcgctacggtggcggcgcacttcgccggaacttgcttgctcccatttcctcctctcacttagcagctaaggtgctcatttctttctctctcgctttacaaattactcttcatatcataatccctactattctttcgccgctaccaatccatttccttttcagttagataacattaattaattatgtagtgtaacttactgatgttctcgaatgacaatcacagtcacaggtgggtgaaaatgacaccaaagcagctagatggttttctattatgagctctgataaatccacaattgattcctcaaacttgaaaagggatttgttctttggcaaacgatatgaatcaactgctgcagaatctgcttcctcagcggccgccgagagatatgagtaccaagctgaggtattctatttcatgtctagtctggtgtcatgagcataacttaactttcgataatatatatgcatccttggctatggcaggttagtcgcctcatggacctcattgttaacagtttatatagtaacaaggaagtgtttcttagggagcttatcaggtatgctcttttgctcgagtagtatttgcatatttcttgtctgatagagcatttttgttttgtgtttcattggtgcaaatatatttatctacaccctttttaagcgctgttgtggttgttgtgtatcatgtatgatttcctgcagacatgctgcaagtaattgaaggaaaactatttccaaaaagatagttgaaaaatccaaaaatagagaagcctgtgtcttggtattgattaaatgttatgaaattctgcattgtccaagctatttatctatacattttcatttgcagcaatgcaagtgatgctttggataagctgcggtttctgagtgtaacagagcctggactgttgaaggacgcaattgattttgatatccgaattcaagctgataaggataatgggatcatcagtattacgtaagagaaatagctatgaatatgattaatgtttgattaaaagtttatcatttcagttggtgctgcaacttttgttttttatgcagtgatacaggtattggtatgactaggcaagaactagttgattgtcttggaactatcgctcaaagtggaactgcaaagtttttgaaggctctaaaggatagcaaggatgctggtggtgacaacaacttaattggtcaatttggtgtgggattttattctgcttttctggtttctgatcgggtatgcatttttgtaaaagtaaatatgtgatgctcttaaatttttttgtttaatatggtatttatatagttttttgttgtttgaaggtggttgtctcaacaaagagtccaaaatctgataagcaatatgtttgggaaggggaggcaaatgctagctcatatacaatatctgaggagacagatccagagaagctgattcgaagaggaactcgccttacactgtatcttaaggcatgctgataatttccttttttgaccatcaaatattttttagttttctttattcctgagattaattaaaaatgtgatttctttttgcctatcgctatctttcagagggacgacaaaggttttgctcatccagagcggattgagaagcttgtgaaaaactattcacaatttgtctcatttccaatatacacatggcaggaaaagggatacaccaaagaagtatggctctacaatccagattttttcagtttgatagcactatctatgacagtattattttcattttaagttaagttcatcccttctagattgtaaaaattgaatttttgagcttttattaatttttgggctcattccaggtggaagttgacgacgatacagctgaagacaaaaaggatgatcaagatgataagactgaggtgacaatctgattgttctgcatatatgctgaatcaagtattttgttgaatgtgaaagtgtgattgtgtagcttctgcaaatttactcattgactcatgactgagtctttgacacattgttatgacagaaaaagaagaaaactaaaactgtagttgagcggtactgggattgggagctgacaaatgacacccaaccaatctgggtgagttttatgatttccaattccatgatttgcaattatattgaaaatttattactcgaatgaagattgtggcattactctatttatgcagcttcgtaatcctaaagaagtcactaaggaggagtacaatgaattctacaagaaaacttttaatgaatacctggagccattagcatcatcacactttaccacagaggtaagaatttaattgtctcaagtgccatcttgttgtgtgtagtggatttttttatttgttgagttcagctgaaaaacatagcttgagaacatcaatttttctccaatgtccataggagattcatagtgttaatttgacaaccaatattgtgttggttatttttattgacaaatgtgtggatgatgtttgttattgcagggtgaggtagaatttagatctatactttatgttcctgccttcgctccctctggaaaggatgacataatcaatcccaagaccaagaatataagactttttgtgaagagagtgttcatttcagatgattttgatggagaactggtataagcactttgctatctacaaccttgaataactggatggtgttctgataattttatccttcactaatgttttgcttgcttaaacagttcccccgatacttaagctttgtcaaaggtgttgttgactcaaatgaccttccactcaatgtgtcacgggaaattcttcaagagagccgcatagtaagtagatagggcaacacacatattcttacactttacatctgaatctctcgtttaggatacactcataaaattccttaccagtttcatcttacttaatttttttactccgtggtgcttgaaggttcggattatgaggaaacgtcttgttcgtaaagcttttgacatgattctgggaatatccatgagtgagaacaaagaggtatataattatttttaaaattgttaactgtatacagtttgctttcattttttctttaagttgtagaggagctaggataaattgaggtggctttatcttatagatatatcaactttatatatatcctatcagttgcttttgatctttcttatataacttctcttaagctctttttaaaaggatgacctttttccctgttaaattttactgactgacttgttctgtatgcaggactacgagaagttctgggagaacttcggcaaacacttgaaattgggttgcattgaagaccgtgagaatcacaaacgtattgctccattgcttcgtttttcctcatcccaaagtgatgaagaactgatcagcttggatgaatatgttgagaacatgaaacctgatcaaaaggatatttattacattgctgctgacagtgtgactagtgcaaagaacacacctttcttggagaaacttgcagagaaggatcttgaagtataagctgtttttttttttttagtttttaacttttgagtacttatttctatcgattaatatatatatatatatatattggtgttttttgtaatgtaattttccaggttctgtttttggtggatccaatagatgaagttgctattcaaaatcttaaatcatacaaggaaaagaattttgttgacattagcaaggaagacttggatctaggttaacttctttcttctttaaactttcaataatttgattgaacaaaaacccgcattttgttaaccaaatatttgttagtctctcttttgagctaattttaatgttgacaatggtgtgaatttgtagcttggttcttgtttaatgttcaaatttgttacgtatagtttgttctttcttttatcttatttcccctttcccctccccttccccttccacttttttttaaaacctcctcgtatctatcattgggttcatctatcaccgccccaattagcttgggttaaaggtgttgttgatattgatagtttgttctttttgcaggtgataagaatgaggaaaaggaaaaggaaatgaagcaggaatttggccaaacatgtgactggatcaagaaacgattgggagataaagttgcaagtgtgcaaatttcaaaccggcttagctcttcaccttgtgtccttgtgtctggaaaatttggttggtctgcaaacatggaaaggttgtcatcttttttctttgatattaaattatgtattttgaaagtttgagtagcaatgttcagtatgtaatcacacttactgcaggctgatgaaggcacaatctatgggtgatgcatccagtttggaattcatgaggagcagaagggtgtttgagatcaaccctgaccattctattatcaggaacttggatgtacgataaatagagaatccccacttcttttctttgtaatgattacaaattgaaattatggtatcgtaatcttgatggataattttcaggatgcatttaaaacaaatcccgacgatgaagaagccctcagagctattgatcttttgtatgatgccgctttggtttccagtggttttacggtaaactcatggctccatattattgaatgttatttaagtttccattgcgaaatcctaaactttgtgtcttttggttgtttgttggtgtgcagcctgataatccagcacaacttggagggaagatatatgagatgatgggtatggctctcactggtaaatggtccacacctggtcagttccagtccacggtaatccggccccataccccagaaactgtagaagctgaggtggttgaaccaactgaggctggtggtcagaagtgagaggacagtcatgtggacatttttgttttcttccccttactttctgttctttctttcaacacttgttctttcttttaacactgcttacgggtgaaattgtattcttgaagaacatgggtattgatagtaacatttagttttttttttttaaccaaagtaatatttatagttatcctttccgttgtaattataaaacatccagcataaccaataagtgtttcttttgcttggggaaaaatagataccataataatttggataaatatgctgtggcagcatgagataagaattatttcaatggaacagttgccaaaaaaagattatgcattgtactttggtccaataaatctgttctatttttggtgaatccattaaatcaaatatggacttttacttctgcccctcccaaaagacatgtaaagacataagtacccgtcactagacaccccttcaccaccattgcaatcggacacaaattggctatactcacttccaccagtgaaaccaacatcactaacaatgacaacgttagaaaggtagtagcaaagaagagaaaataaaagggttgcaatggagaagttagaagttactgtgtttgaaaatcatcagtgatgttgtttttggtgatatcacctataacgctgttgtgttgacaatctcactatcgttcaatcagattaaaatggcaaaattttgcacaacaaaatattttctataatagtatgacaaaaaaatctttaaaaatcacattacctatttatttcttgatacgatgcaaaacttgctcaataataactttacaaaaagttaatttttttttttttttttaggaagagaaagaaattttaaagagttcatatgtagtaataagtaggagagatagttgttttttcaaataatcataattaataggttagttaaaagtgatggaagtggataattaattatgttgaacttgtgcgaacctgtgcaaactcgtgcaagtttgcacaagatagaaaaatctttatataaatactaatagccacaaaccaggaaggtgttttgcttgcatgacctctcaatttgaccatcacaaactagccacaaacttatccccttaaattcaaatttataacaattgttcgtaattttttgcttcaggtttgaaaagaaaaggatcaatggaattggtccacaaagaggggccatgttcccatcttaatctgagagcttagttagccattgatgtgctgaatctagacaagcagagtagactacatcgagtccaggtttaggcgtgacaatgaggatgggaggaattatcattctatcgtggttcaattgttaatactttgaagtttgaactatgttgtggtggttgatatagggacaccaaagaaggaccatacacttgcctttgacacagggagtaacataacttgtaacataatttggactcaatgaaaactcaactgcattgattgttacccgcagaaagatgcaaaatataatagagtggagtcctcatcttattaggaagttgaacgtcaagctccacattacactcaactgaaatcggttataggaaatgagccacgttgttcatcactcacacatccatgctagtacaaccaatactatctggatgattcccagacccacaactacttcagccaagagcggctcaccctgaccgacatcgacatcatcgagggcttttgctttggttgcgactatctccaaattggcgacctcgatgagtgttacaccaacattatgggcatcggcaatgaccttctctgttgtgggacaaacgtctgcaacttacaacaacaatattttctcctactgtctcccctccacaccaaaaaatggacaagaaataaaaattagaattgggtacaaagactataaacatatctcaactttgatttaataataaaagttgataaagatatatgtaaatgaattttcaaatttatgagatcattcataaagtgcattcaagtattccatctctgcagataaaaagagtattacatgatgaattgaaggccgataaaagtatagaaaactcaaaccacataatgaacgtaatttttttagacaaattaaaaatgcattgattaaaagacacaagtgcaaagagtattacatgatgaattgaaagttcatccaagtatggaaattttccactgtcccatctcaaataagaaaacatatattatatactaattaccaaacaacacatccacctatagaagaatgatttatacaagtaatccttgcatataaaaagagcatggttgtgacaatctttcatacacttttacttccttaccttttagctaacatgacctggaaatcttattttctctctcattttcttgtttctcttctccctgaagaacaacattgttttaaaaatcacattacccatttatttcttgctacgatgcaatacttacttaacaggagctttacaaaaaattaagatttttttatggtaagagaaatcttttttaaagagtcatatgtaataataaacatgagatagttgtttttcaaaaaattataattaatcggttagttaaaaatgatggaaagtgaataattaatgatgtttaacctaggcaaactcgtgcaagtgtacataatgtttttctatcctatgtaaactcgtgcaaatttgtacaagatagaaaaaccctattataaatacaaatagacaaaaaccaggaaaggtgttgtgcttgcatgaccctctcaatttgaccattgcaaactaggcattcagtgcatgaagaaaaaaaaaatcaatgatcaaaatgaatatgttatgaacaacattcttttttgttgaaaaaatcgtgctgctttatgaagaaaaaaaaaagcataaacaaagaaaaatgaaatgtttgtgttccttgtgagcatgcaaaataatattaatccaaaaaattaataacatatttaataataatttgataatctttcctcaggagatctcctctccctccgtaagacattgtagtcaagtattcatggcaatgaaaatgagttttattggcaaagagtgatgacttatgtcacgttacgctcaaaacagaaaagaattttaaattacctttaaaaagagtttggtacactaaatagtaataatacattcaagtaatgacaaatccatgggcagagaagcacatttatttaacaattcaatggatggactttattatacttcatacattattgacaaactatgcaattacttggtgcacaactcatttgctttgaggacttttagtggtataaagaaaagtgcaaataaaacaccaacacttcctttgtaacactgttttctacttgttaaaattcatgtgggtcctactagttttggaacaaaacccactaaatgagaagagacttgcatatttgatgggaccaacataaatttcacccaatagaagagagtatgtcaaaagaaaaatgttagtgttactagcatttttcatgatacgctaaggtgttaatgacaatttgggctgcaacaacacatccatacggcacattgcaacatcagtaatcgaggtgggtatgagctttatagactgcaaagcactggtatcgtagtctgtctttcaaaattgaacactcaacccaattggttgactgagttgcatacatgatggtatgcaggatgccaaatttgatgattgaaactacacttcagattatgataataaacccaacattttttatatcttcatgcaacaagcactccaatgctatatcatctatagattccctgcaggaaaaacaaatgtccaaattcagcaaagtttaagggtgatgatgcaaaagactgtaatggtaaaagtcaccccggcagcacagacgcatttgatacacgggaagaaacaattggcaatcaagagaatgagaaattagaaagaacaataattattgggggtgaagtttcaccctaataatagggtaaaaaaatcatcccccctaaagaaatattacttctataaaactcacttccttaaaaattctacccaaaaaattctcccactttttaccctcaaacaaaacccaaagttattggaccaaccagttatgaaataaactttggggtcttcctgattcatttttcaggcaatgacaaacaattgtgtacttaacatgacaaaggcatgttagtacaattaaaagttgaaactggtgataaaatcaggtgacatacagactaaaaaatttccatgctctagagagattcacctatactgattagattgaaaaccagtaaaggaatcatcttaaaatccaaaacatcagatttccatatgaaacaaaaaagaaagaacaacttcctttgaaaagaacaaaacagggtgttccccaagagaaggaattctatttgaatgataggcatcctctttggatcaaaggataccttctgcaattggctgcttgatacagtattcaatagattttaaggtacatttgatgcctatgaaagtgttttgaaggtactgggttacatttcagacttaagcatacattcagtttatacaggcttctatcttgtgaattttaggcatagtagaatataaggagctataagaaggaaaaagagaattcagtgaaaacaatgcttttaatggatttatttttttttatccaactaactatgaataaaagtaggaagctatgttttcctgaacataatacagtaaatgactttcaaattgacgggtaaaaaaaattccttcaaaataataatgtacttatgaagaatctatgcttacctgctgaagttctcaaagatttccaagtcaggatccccatgagtagaattgttaagtcttgaatcacaattatctatgctagcatccaatcaacttagtgcctgttgatcaaacattgggtaaggtgtgttgatgaatgatgatataaaaattattcaagggataatgaaccaattagtgaaaagcaaaactcaggcattactattgcagaaaacaagaaaatatataaaggcaaagagaacaaatggtctgcctcccaaggactggaagaaaactatattccacccacatgcctcagcaattcctcatttacattgatacaaaacagaatgcctaactcaacccacttacccccctccctttagacctatgcataactgctactttcgcataacaagtttgagaagatgaatacacctgataaattaacagcatatatagattcatagagcctctttgcatgatttttacattatgccttatttctttgccagtctcagcccaacctaactagctgactatatcacttacagactaacactaataggcatctaacattgtcctgcacaatagttgcatgcactggaataccaaggaatgctttttagattaggcatttcctaccaagcacaataggacggaccaagcatagaaaacatagaaaaggtatcaaagagcaaatagcacaacatacccaagctacttttggcagaaatcatcatgttttccaagttttgagcagcctcagtcatgccttgggtgttgtatgcctggatcatgcaagcgaaagtgatgttatcaggttcacattttctttctctcatagccaagaataactcgcccatcttttttaagtcgccaacctgaccataggcactaattatgcaattaaagaagggagtatccaatagtacatcagaattttcaacatgcctcatgattgagtcaactttgtcaatgcgccaaactttgctataagcactaacaagtgagcaataagttatagaattaggcttcactcctagatgcttcatcttcagaaagtgttgatccattttctcaatctctccagctttgccaaacacctcaatgacagtattatatgtaacgatcgttggagtgaaaaacctcttctccatgaaatccataacagtcttcatcttctcatacatgccagcttttccataggactttatcatcgtattgaacgtcgttatgtctggctttatccccattagctgaaattcatcataccacttctccatcttatcaagttgcccagcatttccatatgctccgacgaaagaattcagcgtgaaaacatccgggtgggagttgcagttttcaatcatattattcaatgcatcatccatctgttcaaacatgccagccttaccatatccatcaatgatagaattataagtcacacagttacatccgatgcccagatacgacatctctgctagaacatgttcaatcagatcaaaacgacgaaatttcgcacaacaacggataagaatagaataagtatatacatccggttcgcagtcaacaactgatttcatatcttcaacagtagaaaaagcctgatcaaggagaccactttgaccataagcacttgcaagagcagtgtagacatcaacagtaggtttaaggccttcagacaacatgatctcaaagagcagagaagcctcttcaggctgcctgcacttgccaagcatcatcaaaagctttgcatacgtttggcatcgtggttgataccagtattgtttacgaaggagtgcaaaaatctgcaaatgataataataataataataataatcagtcataattacttgtttcagagttcagacacagaaaatgttaatcctaaaatcaattaattactggcctcgagagcggagtgcgaacgacagcgtttgatggcgtcgtcgagggcttcgagaagggccttgggccagagctgtttgtgggaggaagacttggccttgttctgaacgcctctgatggcggcttcggttcggagaatgcggcacaagtccttattggggtccttcaccaactccacagacgctggtttcgaactccgcttcaacgactccacccgaaaacgacgacgtgtctttggaggagtacggttggttgaagaggtgaagggtgtggcggaggagatggaagaggaccatcttaacatcattggagatacaacaagagtcactcacaaccatcttacaattttttttaatattcgcaaatatatgtggatatttagatgctttaactataatttttatttattttaaccatttctttaaaaaataatttaaaggtcaaaactaaagttatttaaacactcaacacaattatattaattattatactttattttagaaactaaatttaaatattaaaatacttcagtcccatgaattcaaacaaaacttaataaactttagggagtgtttcttcattcaaatccttttaaggatttcgagaaatgaggagatcaaaacatatatttttacatttatttaaaggtaattgaaaaatactctttcatatcttttatttttaggacagtgagatattcatgttaatgttaatattatattgagatgattcttatgaaaagatggtgaaaatatgaatttttatgaaatgagaatcgtatttatgtaaaaattctattataccctcgatatcaatatctaaatatataagttagtatttcagattttactgttcaactttaataacaaagggtgtgaatttaaagacagaagacaagtatgttgcagttgttttttaaatttatttattgatatgaaggcagtttatcgattgtgtttttggtttacttggagtttggttaaagttatgttgtatgtgtctttttatgttgtttgtcttttacaagggtattcgtttctttaatagtaaaatgtggttaagaaatttattagaaaaatttataagattctttaatgttatttgcaaattacagtatttgatctcgtgtattattgtgtaggtgtatataatgagttattttatgtataaaaaaatattttagttatataacatacattcttagaaaaaataatgtgaaccgaaccaaacacattttaagaatatttatagaaatataaaaaatatcttcaatcaattttaatagttaaacaaatgtatttttcgtgaaatatccagaaatatcattctcatctaatattcttgaaaataacattcccaagaatgaaaaaagattccaagaaccgtccttgaagataattcaattctataagttcaaataaaaactaataaaatataatatttaaatttcacaaatccaaaataattttgaacaaaaatatttaaataattttattacaacaagtatttaacgagtgtaataattaaaacaaatactttaatgtattaaagagtagtttaactcaagtgatcaaataatatgtgaaagttgttgtaaatttcttacgattgtgtttgattcttacaaataataataaaaaacaactgatatactttaatatctgtctctaccattttattaacaaaaataaatattgcttaaattattcatccatacttatttagatatctattattgtctttatcaagtggattgaaagaaatccgtgatgtttgatccagtaaaaaaatgtttatcttttatctgtttatatatattacaaaatttatccacaaatatatccatgcacaaccctaactgaaaaagtagtcagccaacaatggcttgatggtaagttctatgctgattataacacaatttgatatatttcccccaatatattcgtttatcaggcaatgatataaaataacaactggataaatgcattgaattcggttactttttccctgaaaggttgttcagtacatggtcaatggaaatttggaacaatctaaattgtggtgctgatgtattacaagattccagcaacatgccaaattgcctattttacagattgtgtagtggataaaggagaaatataatggaggaaggaaaaaactattatatgtgatgtgactacattgaagaggttttctttagtattttaaggttgattatattttcttgtctcaattgaataagttaaattttaataattactcctgcaattaacctttttggcaaatgatatcttctatagttataacaaaatattagaataattggaagggtattgttagatatgaaatcatagttttcaatcaatagctttcatcgatgctaacatttagtgcatatattttgaaggtcttgtgtgctgaacttaaatatatttttcataaattaagccctctcatggagttatcttaacaataactatgcttacttataagatttacatcacgttttggaaatgaaatttgtttttgatgaatgattatgcatggcatgataaatgtattttaggctccattgtttgatctattttttgcattgatgtgtgatgtgcttgacatcagttttaccaaaatttctattgatgcccaagtcagttttgcttaatttatcatgttgatgctatctggatgtagcttttagctccttcaactttcccctaggtggttgaggctttagctaactaatattgaaaattcataatgccaaaggagagaggaaatgggtctttgttacatgatagttgtgttggaatttaaatgcttagacataagacatgcacacactattatgatcatcttgcggtttactggaaaaggatggatccagtctcttcttggtcatttttttaaaatctttggctcacgggatattttcaaccaaagttcttgcagagctggaaaacgtggtatgactctttccaaatttgaatttagttggttgtaaaatggacattttgttaagtttttgatacctgcaggtatgcaaggtcccatatctacagctaatttctaatcccacatggcattctcgggcttcatcatggacactctacaaggaggttcctcaatctgttcttcgtggtagccaagccaaaacatcagattattatgagaaaaatgatggcaagcgtcagttttggactaaggtggtggtcaatgatgattgcatcaacgttaaagctgaaggttctccaaatgtcgcaggcctgttcaagggaaagtttgaggaaatccattcaataaacaaatataactgcaacaacttagctgatctttctgagattattttgcagcaggtaaagcgaaaaaaaaattgatgtcattgtagtgactttcgtattcctaagtgaataatttgcatatatgtgagtcttacgtgtaattatacagcaagcttattactgcaattgaaatcatgcaggttgcgagccaaattattaattggctctatcaggaagctatgatgattgggataaaagcaaatcgagacttcttatgcctatcttttgagctggagcagggtgaatcacttggcctggttgcaagtgttgatccagaaaatagtgaagggtgtatctcttggtggttggtcatggaggacagttttgcagaggagcaaaagcttcatatgagcatcacggatggtgcatctgaatataggaaattcctaggtcacttgtctcttgatttgttatacgcaacactgatcgacttggttggcttgtgcagtggtggaggcggccaatgaagttgtgtgaatgtttttcttgcactttgtcaagtgaaagaagatctaggactaggaggtctcttgtgcaacaattatatataatttatgtacattacttctcaactaatttaggagagaaataaaagcatgatctttattgtaaggttttgatcaaggatcttaagtttaagatctgatcttcattaaatcttctaataaaggagttgaatagatttttaacatgaaaaatgagttcttatagaagatcttttaagttatgtacattgttaaaaaaaaaaaaaattcatttttctctcatttcaaaatgagatttattattaaagaaaaaaatataagaggtcttgagagatctttaatcttatataatactatgaggtttaccaaaaaatagtctaaaatttcaatttaagatctatcactaaagaatttcaagagaatgtttttttatattaaatgagatgagatgcagagaaaatgtagagtttttttttttcaccttaatttataacgtgatgtcataagtaaaaatagactgttagcttacaattaatgtatataaaaattagaagaagaaaaacttcctggtcccaattattatgttatgtaatcataatggaaggtaaagggaattcgtgacaaaagatgaaaaaaaaataaacgaaagtaaagaatttataaaagcaaaccgttcaacaattcatgataattcagaaaccaaggaaagaagcactgaacagtaatagtataatgaaattgaaattgtttcaatcatacttacccgtcataatgaaactgaagagtaatggtttccattaggagcgttgtaatgacttggcataatttggtgggaaattaacggtacttgacagaattaattaacgcttttgcccaacaagaaaaagatggcacaattatgaatgagtaaaatgtaacgctagtcaaccgtgtgaaccagtcatcgttggaaaacacgaccagaccaccttccttcccacttccacagttcaaacaaaaaataaaatcaatttgattattctattttgtcgtgttcttcttaattcgccggttccgtccttttcccggtctgaaccggtcagggtaaaatgggcaaacacaccattcctattttgacctaaccaacccatttctcttctttgatcccccatttcttcttttattaagttgtgaacaaggaagatacatactccaatcgattagccttctttccatttttcttctcctctctctggtaaccttcctctcctttttaatccaaattatcattcttattttttcaaggatatttttgctgtgattgcgtgaatttcgatcaacctttgaaacatcctttgcagcgacttttatgtctcaattttaatgtcaactttctgtgctgggtcgttcaacttgcatctttatcatttgatctattgtttgagttgatgagtgaacttgtgtgacatcatagtttctgtgagagattgtatatctctcaagcttctttatttgataagaagcttgttgcacaatagaatcaagagtgaaatcactggtattaaactttctaatttttcttcttttccgttatcactgatggattttcctgtgattattgtatagattatgataatatgttttttcgaatgtattttgttttttggcatcagtttgtggaaaaattggggcctgactgcttactaaatagtttgataattattctgtctactctctagtctctagtctctagtctctagtacttgctttgtcttttgtaatgtttctgtgttttggaggtttatgtggagtgggggcagaggatgaaaggctgtaagcctgcaacttttagcagattttgaattttctctagttcctcgctcatttgtaacattttagtatttaactatttgtagcataacaaagaatatgtgataatcatgtgcagttgtatataatcaccttagctagttactgactaagttaatattttttgggtaggtcaccaggctctaacataaaacagaagcctttgtgaaaaagaaaaaaaatgctccctccaccacagcagtcacgggttggaggactacaaacctctctatctctagtttcttcggatccccgcctttctcccgaggagcctagatcaaactctgacaatctccgtgaatctcctactgaaagtgccagttctcgagaaacttggcctactgctgatgcaattgctgcaaagaagatggagaatggaaaagcagagatggattgtcctgatcagttagttattcgccgtgtttctagtgcagacaaaattagtcttcaggacattgcaagagaacgggttgatataatatgtgagaaaatgcatcttttacctgacgaatttcttgaggaactgaaaaatggacttcgagttatccttgagggagggaatggctcacagcatagagaagaatttttcattttgcaaaagcttgttcagagtagatctgatttaacagccaagacattgataagagcacatcgtgtacagcttgaaatccttgttgcaataaatactggaattcagggatatttacatcctagcatcagtctatcacaaacatcactgattgaaatatttgtgtacaagagatgcagaaacatcgcttgccaaaaccaacttcctgctgaagattgtacctgtgagacgtgcactaatggcaatggtttctgcaatctttgcatgtgtgttatctgcagcaagtttgactttgaagtaaatacatgccgctggattggatgtgatttgtgttctcattggactcacacagactgtgccatacgtgagcaacttatttgtatgggcccttctgcaaagaatggagcagggccaagtgaaatggttttcaggtgtcaagcatgtaacaggacttcagaacttctgggttgggttaaagatgtcttccagcattgtgcaccatcatgggatggagaggccttgatgagggaacttgattttgtcagtaggatctttcatggtagtaaagacccacgagggaagaaactttattggaagtgtgatgatctcaaggaaaaattgaaaagtgggaaagtggaatctaaggcagcatgcagggcaatattgatggttttccaaggtacaagttttctagtttacctgcaagttgtagtttgaaagtttctgccttgacataggctacacgcacatggatgcacatgcacatagtgtgaatacaacattattgttttaggcattttttttgggcccatttactatgttcatatcatagtagtatttgtttgtactgaaaagttgaaatttcattaaaactgtgttaggaatgattaaaaaaagaagcttttagactatactttgaggttatctccaaacttcctgctttctcttcattaaaacctgaatttgaagatatctaggaataaaattgtgatttgcatagttaaaaacatgtataatcaataaaattaattctattactttattaattatccttcttgttttaaccaatgcttttcatatatgaagagcttgagctggactctccaaaaagcctggaaaatgcagaaagtggaaggctgattgctccccaggaggcatgcaatagaattgctgaagtggtgcatgaggctataagaaagatggaaatagtagctgatgagaagatgagaatgttcaagaaggctcgcttggcttttgatgcttgtgaacgtgaattagcagacaaggccagagaagctggagaactgaaaatggacacgcaaaaaaagaagttacagattgaagaactggagagaattgtgaggcttaaaaatgcagaggctgatatgttccagttaaaggctaacgaggctaaaagagaggcagagcggctccagaggattgctcttgccaagtcagataaatcagaggaagaatatactagcaactatttgaagcaaaaattaagtgaggctgaggctgagaagcaatatctgtatgagaagatcaaattgcaggagacttctcgtgtatcacagagcagtagtgggggtgacccgtcttcaatgctgatgtattccaaaatccatgatcttctctacagtgttcctccaaaggcagacggtcaatctaatgagtcccaccctttcagaacaaacccatgagtactggttcagtgtatgttataatcttttacatattatagcaatgttattctgttgcacaattgatgaagagttagtctaattccattaggttcaagcattgtaagccttttgtagatcgaagaggtactagtaactaaaggcttaactcagtttgaaatttggtttgttctatgcggtgtatgtatgaatacgcatttgtgacaaattattgattgtttcttgatttgtggaatctaattagttagtcaatatgtttaacattgtggtgagtgagttggatcaggactacaggccaaatagatcattgtggagacaaagtaaaagtaatgttatcttattgataaaacgaaacgacattacagaagggcaaagtatttttcttgccttactggaaaggtgggatattcatctttttgacagataaggatgggtttgtcacactgctgttctttgggtcttccttgggttttggagctcggtgggaaggcaccatgttgtcaaatgtcaaagcagcactgattccgtggcatcttatggaagagctttggcacacatttggtgtgacaatccttgcattgttgacaaacaaacctgttctcccaccgttggtgatgctgatcaccctgcttggaacgctagagggaaccacagagccatttggaaaatgtaatagatggctgagaactaatggtgttggaatagaatggctgagcatgaaatcatgaacctggtctagagctattgagaattgagatagttcatcatcatttggcattaggaatgtcaaatcattgttttgcagtgaattgggctggctgttgagtattttgaggaggatgacaaatccatagtaggaccgacttctcatgtcagtcatggctacctgcaggtcggtttggttgaatgacattgtggactgagattcaccaatggcaaagaatgtaagaaggatcacaaaccagatagccattagggaaaggatgagattttgcttgaatgtttactgtttgtgattgtgtgtgatgaatgcaatgacatctcagtttgcttggttttcatagccacgttattgtttcacgcttatcttgccacactttcttcccctttctaggaatgtaggcgggaggccggttgtgcatgatgaggtacggagaatgtagtagttagccaaggaagctgagattgttttggagtttagaggaaagtgatttttttatttatcaatattcagtactaaaccctttttagaggaaggtgaatctccactttacatttttctgttttacatgaattacctacccatcaaggagtgattattgtgacttaagcctcgaaaatcaacgagctatatctgagtttgacccattttcttattctactatgaacacaatatgtaaggaaataggaatagaaattattttaggagaggaatcataaagcgatgacagatgtgttttaagagacaaagataggaaatccttttcagattttagctacgaaaacacctagtcctaggcacagaactcttcgttggtaacttttaacttcagacagaagcagtttgttgagttaaacaacatgtcaatgtcatattagagtgatcaggcgattgtacaggtgtctgcagggcaaacataggtttatcaaaactttgtatgaaaaaaaatgagtaataattttttgaaaaatactaacccatgtcccaagagtattggttaaaaaattaaaaagaaaaaaattattgagatatacaaattgtgttgtctataattttttttatgttttcctatgattttgataataaacattttttttagttctttaaccaatatttttttaataaaaggaaaaaaaaaacttaaaaaattaattattactttttctttttagttttttctcttctcattttttctctaccaccagtaatggttcttcgaacgtcgaagtctttctcgcttctagtcctaggaagattaagaaaattgtcccccatgatataatttcttagacgagtcgcgccagacacgaaattttccagaaatctagttggcgtcaaagttgagaaaaactttatacactcagcaaaagactaatacattattccaatacagtgtattttcaaaaatatccttgctttattagcgaatccgtatgactaaaaaaaattcttatggattagttaatccgtaagattcttacggactgatgaatttgtaaaattcttatggattgacgaattcgtaagaatcttacgaattcgtgaatctgtgcttgtataacgcgagggtacttcagccatttaaaaaaattagaatgatgtattaatcttttgctgggtgtataaagtttttcccctcaacgttaagcagtgaacattacgcactcgacaatgaacaatgcccgtccagtagcgatatgcagggactccgttcacgctaggcccatgttttgcacctgtcaaacactgtacaattcaacatctgcatctctaaatatgctcaaaacattgcaacttgtgtcgatttgtttttgacgatgttgtagaggaatcataatcaaactctcttcatgaaaaatatagatctatattttttctttaaacattgcacttgcgttgatgttggtaggacaacgcgtcatcttcaactttaagtccaattttgtctatgttccgcgttgaatcaagaggtatattttttctatatatttttttatatatatcaagaggtataatttccttccatcgttattctatttttagataaagtgataatcattccatattcaagtcaagtcaaaattaaatctcaaatattgattaagaaacctaagtgacaaaccacttataccaataacttttgttgttccaccttgaatctaatcaaacaatcttcatgaaaaatatagatctatatttaagcttttcacggggaccaagatgacttcaatcacatttctagagtttgacaaagaggagatataaaatttgaagcttctcaatattgttcatcttccctacattaaaaatccaagaaaagagaagtctattcacgcttttttctttcatttaaaccattgaaatcatgaatcacaaaaaattatataatatgaattattttctcccaatattccaccaagttaatgctttgaaacatgttaaaaaaatctataaatttggatatattgtagatttatcaatgatcttttaaagtttgcatcttaactttagtgtttaaaaaacgttttcatctcacaatatattgtaacaataatttttttactttcttaattatttaatttaaatcatcaattagcattgctttaacttagcaagttcgcattaacatatacaattagaatcactaaataaataacttaattttaagaaaataaacaagttaatgttgattaatgtaaaaattaatttttgtatgttcaagaatgatttccttattaatatctaaaaaaaagaatgatttcattaatgaaaactccaagagtattaattatgattaaacattttaaattcttttaaaacaaatattaaattatttttaaatgttttgtataatactatttttattttgttaatctgtaccttaaagttagaacactcttataaaaacgaatcatataaattccatcttcaatattcattctgcattttaattacatacgtatacttatctcttaaaactttttcgccaacatattttaattctttgaaacacgagcatgctctaaattgattcagctgttgaaaacttcaactgccacttgttttaagtggtagtcgtgtctccaccataggtgggggacaccttcttacccaaatggtctccaaacgctagctcctatattagtaaaacaaaaataaatttgaaatcttcaatttgaccaagagtcaatatggtaaatcatttcaagacaagcttggagattataatctttcatgctcaatttataaagccatttgcatcagcatgtcctcttcacacccattattataaaatataaacagctaactgacactatattatataagttcaaattttgatgaatatatcaaccttacagaaataattaatgttcactagctagctaatattgagggttacagacatttgcaaagataaaaatcagcagagcaaaggttgctatcaagcttggtcaagacaaggttgtgtgtcaggaaaatagataggtgagctaatttataatatcttttgtcttttatcagttttgtctctattttgattaagttgtcaacttcagacttgtacatgttacagttgtcgattttatttaggaagaataatgaaaaatatgacatttagtaatatttataaagaatcattctaataaatccttttatagcaacatttttttttactatataacccttttatttattaaataaaaatattaaatatttatattttgaaatattaaatatttattttctattcagtgtttctttcataaaatcttaagaagattaatagtagcgagagaataatatgtcgttattcatttatgaaaaattcaacaaagacatgatcatattgatataatacatttttaaatccaaaatatataatcattaaacttttacttaataaatagttaaatttgtttatgaaaatataagacaacgataaattaatctcttaaagatatttaaatttatttttttaatatgtaaaaaatataacaaattaatatcacaaataatttaatgacaaattaattcttaaacttataaattaatatcaaattgattttcaaaaatatatatttttatcaaattagttcttaaatattataatttaataacaaaataattttaaaatttaataataaaattaatttatcatacattttacatattaaaaattaaattttatttttatttttcataaattaatttatcatggaatcacatgttttgagatgaatttaattatttattcaaataaaaattatcatcttattttattattgtcataattgtgtctctcaaactgggaatggactagctaggtagctgcatactaaagcttagggcatagcttattacgttgaaattgaaagcagttattgtacatccgaggcagactacacatgctgttggctgccatctcccactgtattcagatatcttgttaatgtttggtacccgccttgtatcaaacgtctgatgttaccttacgtagttatattcttcaattttctctctctattcactactgcatgtttgtgattcactttttttgaatgtgcagtatcccaaattgaaagttagcgaccaatttctcaagttactgaaatttatttacgttgtatttgattgaagagaaacacatcagaaatgagttgaaaaggagggaaaagtgattaagattatgtttacaaaatcatttcgttgaatgtaatgactgttttctcaaaagtaattaaggaaatacttctttgtgctcaagaacgtgcacgtgttttctccaatgaacaagtattcaaacatgtactaagtataagaaattcatagtttgacatatgaagaagtattgagatttttttttaaaatttgtgaatcttacataaaaatattttggtgcaaaagaaagtcgaaatagcaaagaattgatgagaatctagtctcagaagcgttgttcacttgactgaagggtgtatnnnnnnnnnnnnnnnnnnnnnnnnnnnnnnnnnnnnnnnnnnnnnnnnnnnnnnnnnnnnnnnnnnnnnnnnnnnnnnnnnnnnnnnnnnnnnnnnnnnnnnnnnnnnnnnnnnnnnnnnnnnnnnnnnnnnnnnnnnnnnnnnnnnnnnnnnnnnnnnnnnnnnnnnnnnnnnnnnnnnnnnnnnnnnnnnnnnnnnnnnnnnnnnnnnnnnnnnnnnnnnnnnnnnnnnnnnnnnnnnnnnnnnnnnnnnnnnnnnnnnnnnnnnnnnnnnnnnnnnnnnnnnnnnnnnnnnnnnnnnnnnnnnnnnnnnnnnnnnnnnnnnnnnnnnnnnnnnnnnnnnnnnnnnnnnnnnnnnnnnnnnnnnnnnnnnnnnnnnnnnnnnnnnnnnnnnnnnnnnnnnnnnnnnnnnnnnnnnnnnnnnnnnnnnnnnnnnnnnnnnnnnnnnnnnnnnnnnnnnnnnnnnnnnnnnnnnnnnnnnnnnnnnnnnnnnnnnnnnnnnnnnnnnnnnnnnnnnnnnnnnnnnnnnnnnnnnnnnnnnnnnnnnnnnnnnnnnnnnnnnnnnnnnnnnnnnnnnnnnnnnnnnnnnnnnnnnnnnnnnnnnnnnnnnnnnnnnnnnnnnnnnnnnnnnnnnnnnnnnnnnnnnnnnnnnnnnnnnnnnnnnnnnnnnnnnnnnnnnnnnnnnnnnnnnnnnnnnnnnnnnnnnnnnnnnnnnnnnnnnnnnnnnnnnnnnnnnnnnnnnnnnnnnnnnnnnnnnnnnnnnnnnnnnnnnnnnnnnnnnnnnnnnnnnnnnnnnnnnnnnnnnnnnnnnnnnnnnnnnnnnnnnnnnnnnnnnnnnnnnnnnnnnnnnnnnnnnnnnnnnnnnnnnnnnnnnnnnnnnnnnnnnnnnnnnnnnnnnnnnnnnnnnnnnnnnnnnnnnnnnnnnnnnnnnnnnnnnnnnnnnnnnnnnnnnnnnnnnnnnnnnnnnnnnnnnnnnnnnnnnnnnnnnnnnnnnnnnnnnnnnnnnnnnnnnnnnnnnnnnnnnnnnnnnnnnnnnnnnnnnnnnnnnnnnnnnnnnnnnnnnnnnnnnnnnnnnnnnnnnnnnnnnnnnnnnnnnnnnnnnnnnnnnnnnnnnnnnnnnnnnnnnnnnnnnnnnnnnnnnnnnnnnnnnnnnnnnnnnnnnnnnnnnnnnnnnnnnnnnnnnnnnnnnnnnnnnnnnnnnnnnnnnnnnnnnnnnnnnnnnnnnnnnnnnnnnnnnnnnnnnnnnnnnnnnnnnnnnnnnnnnnnnnnnnnnnnnnnnnnnnnnnnnnnnnnnnnnnnnnnnnnnnnnnnnnnnnnnnnnnnnnnnnnnnnnnnnnnnnnnnnnnnnnnnnnnnnnnnnnnnnnnnnnnnnnnnnnnnnnnnnnnnnnnnnnnnnnnnnnnnnnnnaatttgatgatttaaacattttggttggattttgaacatttctaataaggtatctattttctttagtacaaataatttaaaacggagcttaaatgtttttacgaagaaaatatatatacattgaaagtgtaaaataaaataattttatattatcatctaattatatatttttatgtatgataaatttattagtttttattatgattattttaaaattctgtggttgataatactgtataatcattaaactattttatttatgtataagataaattgtactaatttttttttaatgtgtatttatctctctctttttatatttttataaagttttatatttaaataaatattcatagatgcttataaatatcaatactgtttagaccaaaaaaaatatcaacaaatctacagttgctcttcagttattggattaggatgatattcgtatgcatccatatgcagcacttatccaaaagataactaacttcaagcatttgcattgggatctgtccttcaagcatgttcataattatagggaggacaatcaatatgcccgactggttggctcgacaaggttcttcttcaacatctgttattggctgatgtctctaatgtttcttttactatttactatttagtttctattcttctgtttgtatattagtttccattcatagaaaaacaaatatcaataaataagttaatatttataaaatttgttaatatttgtttcagatatccacatggatagcaaatttttcattcagccagacaaatgaaatctctacttacaattatttccaacatgaaaattagactctcactaaagaaaaaaatatatttgcctccctcccctccccctgaaagctagagaccgcagtcattaaattaaccttgaaacttactctcttaacctatgattatatatatatatatatatatatatatannnnnnnnnnnnnnnnnnnnnnnnnnnnnnnnnnnnnnnnnnnnnnnnnnnnnnnnnnnnnnnnnnnnnnnnnnnnnnnnnnnnnnnnnnnnnnnnnnnnnnnnnnnnnnnnnnnnnnnnnnnnnnnnnnnnnnnnnnnnnnnnnnnnnnnnnnnnnnnnnnnnnnnnnnnnnnnnnnnnnnnnnnnnnnnnnnnnnnnnnnnnnnnnnnnnnnnnnnnnnnnnnnnnnnnnnnnnnnnnnnnnnnnnnnnnnnnnnnnnnnnnnnnnnnnnnnnnnnnnnnnnnnnnnnnnnnnnnnnnnnnnnnnnnnnnnnnnnnnnnnnnnnnnnnnnnnnnnnnnnnnnnnnnnnnnnnnnnnnnnnnnnnnnnnnnnnnnnnnnnnnnnnnnnnnnnnnnnnnnnnnnnnnnnnnnnnnnnnnnnnnnnnnnnnnnnnnnnnnnnnnnnnnnnnnnnnnnnnnnnnnnnnnnnnnnnnnnnnnnnnnnnnnnnnnnnnnnnnnnnnnnnnnnnnnnnnnnnnnnnnnnnnnnnnnnnnnnnnnnnnnnnnnnnnnnnnnnnnnnnnnnnnnnnnnnnnnnnnnnnnnnnnnnnnnnnnnnnnnnnnnnnnnnnnnnnnnnnnnnnnnnnnnnnggtttctgtttaaaataatatcacataaagaaaataattattgtacaaccatgcaaggaaattgtattaaatttaaggcatttgaaaatagtttcttcttgttacttattcattaatttaaaaccattaactgaagaaaaagtaatattctagcaagaaaaataaattaaaaaaatagatcgaaagattataaattccatatctttaatgggttaaatcaataagttacaaataaaaggtgagaaatcctgtagctggaataattaggaatagaatgcatattcttgaagagaaatcttcctagggagaataataggcattgtggtgggtctatgcccaactggattttgtaattattgaacctacacatagttactcgatgtgccccatacagtaatgcacttcccacatgaacatagtacttagcttcaaaagatgaataaattaatatagcgtggtagtttccatggcaagaagtgaaaagaaaagttggaaagggaaagtaacaaagcttccaatgccattatgccgaagtggattacaatgaagcatggccctacaagttttaaccatctaagagttgctttgatgattggattaattcttttctgtctggtcactttctttttgaccctcaagtgttctgttttctaatcttataaaatattttcttttctacaacacgtatatcaatgtaaaaattataattatagtaaaagatgtaaaaattataattcaaattcatttaaaaatacatcttaatcactattgacaatttaaaattaattatatcaatttataaactaaacggctcctaaaaccgtaggttttactttctttctcgtaaaatatacaaccactacttacctctaggctctagctatatgtcaacttattttcggcggaagatattgtttatataataacgttgaaaaatattatattattgtgaataaatattttatgattttacttgataaacgtacttcatggtaatggtgccaaattgccaactatgaacagcccaaaaaaaagtaatggtgccaagccaaattggcaatgatgaacactccccttaaaaaaaacaaagtaacggtgccaattggaagcacagctagttcagcttgcatcatcatattccaatatgttgttatatcacccgaatcgaactgacctgcattcataatacggaattttgttttttaccctttatcacagaatttaaaaaatggcgacttataacttttttttcagtatgaataagttaaatgctaaaaattacaagaaaatttatatttgtgaaaaaattaatacttaaggacctgtttgattttgaggaaatgcttctgttttcattttctatttttagtttctttaagaaataatgaaatagtaaaaaataacaaaaaatattttttttataacttttgaaaataagaaatataggaaaataatatagcatttttataattaaaattaaaaacatatttttcaaatcaaacaattcctaatttttcaattctacattagaaagtaggacacccccctcccttccagataatgagaaatagatgagtttttattttttattttttatgaaagagtttattattatatttagcttaacaagaaagtatgaatacagatcaaatttgtttatagatctgactataatataagaaatggaaacgctttattttactaactcaatccaaattgtgtggatatgcacaaagtatgttgtacacaatatattttcacagcaaaaaagaccattcaatcaattgacttttcttttacagaaataaattgacttacataaacaataacaaggctatccacttgaacttacatatgtgattagcatatgaaaccaactcgtcaaggaaatattcaagctcatgtaatctcattagacaataatctgtgctgtgatctgtctaccactcttattagctaggttttacttatgtaggtaggtatatatactatttcctcctcttttattgaactctatgaaaacttcttaagcttctatctgagtgaaacttatacattcttaactttccaacataacagtaccgtataacaggttctccttagcatcattgattaatggaaagattgtaatattgtttaagcactggaaatgttctggatcgcaagaaaaagtggcatgacaataaacagcaataatttggctgtatgtaaaacagtgttggtagttactatttttgctagaaatgacaaatctcaccgccatagcaaaaatcataaaagtgggactccactttaaaacttaacctatttccgaaaaaagtatttctcactaatcatatatcatcattaattaataggcataaccctacttccatatcccacaatgatgattaactctcaaggcaagaaattcacagatctaaactctaaaactatatatgagggtttttgtgccgttgatcaccacctaattaagattaccttattaaatgtttaaaatgataaaaaaattaagttaatacaataatatccatgcaatgatggtcaaaccaattatgcttttgatagtagtttttaatcaaattggcactttgtttagtactattgctgggttgattctcactttcgttcattattatatattggtgggtaaggtatatagccgacattcattttatttgatgcccccattacacctatataccccttatcaaacctatataattttctcaaaaccattgattccagaatactttggcaccatgcgcacattagcctatacccctctgaataattgcccatttttcttccagtacgttttgaacataaaattacagtgttactttccacttatgatggaactgggaactgggaactggacaatgtgctacgtgcattaccatttttaccctttttttaatttctctctccctatctttcaaaatcttattccctctctctatattctctcaccgtttcaccggaccatttcttctcacatatttttttctgactctcttttatcttttctggcacttaaatccgtattctgcagtgcacagttggagtactccctctttaaacactgaagggtgcggtctttgtcaactcttgcaaaagcaaaacaccaaatcgaagttaaaaaaaaaaaagaattaaaattaaccaaaaattcaattatgttatatattgctgaaaaaactaaacagtaataattgatattaaaaaaaactgatgtttttattttccttttaaaatttatttttaatcatggatttttgtttgcttttggttaaaccttccccaccagatgatgagataatcatgatccatcctcaattagctaatgctgcacaccaaactggggagagagagagagggagagagaggggacatttaacattttctttctgaaaaacagaatgggttatatcagcaaatttgcaaggagatgatggtcactgtgtgatattgttccactcttgatgcttctgttgggtgttcagaggtcactgaggcagaaacaacctgttatagaaaaagaacaaattttcctatctcattcacagctcctctcagtgggtttgatttggtgtgattattaccccatgctcctcttcctcctcttcttgttatgttatctcttcaacttcaaccttcacggatacccacaaaaaaacaaacttcaaccttcacggatacccacagttggagtactctctccaatccaagcatagtggagctccttccttgagatatatcaactgggttttgtgcaacttttctcttttgccttgtggaagtatcataaagcaccaaactttatgccctgaggggtggattgctgagaaaatatttgggtttgcttcaattttgcttttgcagttgaagattcatggtggggtgcttggtggttcagctttttgaatgttctgctcaagctgctggggcttgccttgaatctccaggactgttacgttggtgaatttggctaggatgtctgtgaatcgaaggcttcctgcttcaaatggtagattgctatcaaatatgaagtcttggaagctgaatgagcctctgcatgggtctaattctcccaggacatgtaggaggaaacccttgcttctttggatttttggctttgttgccatagggagtgtttggttcatcttgagtttcaatagtaagtatttggtgagcaaggagactgaagcaatttgtgaagagagagagagaaccttgctacaacgttacaatgttagtagggaacagattcatgctttggcttccttgttctctggatcagatcaggtgaactacactttcccctccactctttcaattttattgcgccatatcgtggtcgctgaggataattcataattatttacttttgcttagaaactttaactatttggcttcttctatgtactaactgttctttctattgggcgttattgtcactaaataaacaacttcttgttggattttatatttgagatgaagtgaaagatgtaaaatattgagaaccaataaattgtcttaaatgaaagggtataaactatgctcttctgatgctttttccgcaaggtttctctaggatcgctttatgttgtacaaccggttaagttctaaaagtgatggatactctcttgctagatatttaatagaaaacagtggttgttgcagagatgaatatgaacagtaacaaagtggtgctctttgtcctatgtcttactaagtttatgatgcagattttatccaactgtattgatgaaagaagtcttcaaatactgttaagcagcggcatggtcagtactccacagttaatatgtccggagaatcgagagttacaaaatgagcatacatgtgttgcagacactgtagaacctatagaacaatgtccaattctcaatgattatgtccagacaaggcttgaattatcattcccattgaattatgtatcattggcctcgcactctgcactttcaactgatttggttagttatttgcaccgtggaaaggtagaatctttactaaagctaaggcatgtatttgttatgcccaaaagttccataatataaattgttgactctcctaaaaaatagggagtacccaagaattatatcctagcttacaattctctcttctcactgctcaacctatcctaggggggcataatatggttgttgattaaatggagataaaaaaagaagcatagtgatgaactttagaattcctaaatatcattttctgtaagagtgctgagtttgtggaagctgggtgagaaatgtaactattaataatgcatcatgtggatctacagtcgtaccattttgtatgcacttgaatgtaataaaaagattcccttgaattgcctatctggcatcatagcattctttttatagcctggctagtgctataataaattcttgtattgatgtctaaaagacagggcatcaccgatcatagtctagctttcaaatcattcaacctacagcctaataataatagtcatatcaaggaaaagtagtggattttggtttatttgctccaaatattgtctttcccatgttacttgtgaatgtgatttataccaaagattctgattgtaagcttgtccaataactatgaaggcatacactccttgcatgcttatttgaaacaaatacttccactatataattaatttgctaattcattttggctttgcagaacattgtgcaatcatgggaactgaaggtatctgcaattcgctatcatgtgagttcatctaatttaattaaaggatgctggtgggtcctcattggaattataatgtcctacttctgtttactatggaggaatcaaaagcagaagctagttcaggggcatccagctgcacaacaaaagtggtcgaaacattttccaaggggtccttcaaggggtgctgggaggtggaggaaaaagttactagttatatttgtgtcacttggaataattgggtccttttggttattttggcacctgaatatgggaattatgcggagaagagaagaaacgctagcaaatatgtgtgatgagagagcccgtatgctgcaagatcagtttaatgtgagcatgaaccatgttcatgctctggctatccttgtatctacctttcaccatggtaaacatccttctgcaattgaccaggtaatgtactcaatgtccttctcttctcttattggtattttcccactcccatcttatgcagacttattcatggccagtgactccagatattttgcatgtctcctagatacttttgcttagtatatcttatgtgaatctacctaacatatttgagtggctgcatagtaaaaaaggaaatgtaagtttttttctattctaaggaaagcaaaatctgatccaaatgatctgtaaaaactagggaaaaggcactgttgctcactttcatgtagcaaaaactgcatacatataaaataaaataaaatgaacaaaagtaatggaaaaaggtggggatgctgaaaaatatgataatattgggaaaaaaattgatccgtaatgtgtcaaaagtttgagctattgaaaagtatagataatgaagtaaagctcttgctttatgatttattttttctccacaactagcctaaataaaatttctagcttctctctgtttttttcattgtgttatggtaatgttgttgcaaaaactaaatcttaaaggagagtgtgaatgagggtatcaaatgaatatcttttggcacttttactagctataataagaaaagcatgtttgaccgcatttctcattgtcattgttataaattttattagaaaaatgaactagacctaattcaaccccaaaagctagatcaacagagggggagagaattgcccaagtgttataaggaataatttggccatgtttttagccattgtggagcattgtaacatgcatcccctcatgcccaggactacatatcggagtgtgaagtttgtaagactagacatttacaggtacctaacatcaagattgaataggctttggtatcatatttgaaatgggtgggatctaactcaactctaaaagttagctcaaaggggaggggggaatcactcaaggctcaagcctttcaaggagagtatttggccatatttctagctaatgtggaacgtcttaacaactttatacctgctttaagtatatgctaatcttacaaaaaaatgtacaaggtttgaactgggttcctcttttcacttgtaattctgatatggttaacactgaatttgattgtattagaccagtaaggtttggatatgtgtgaagattgcatagtataagtctccatgttgaaaccacattaaatttatgagtcctcttcaactctctgctatttatatgttgttcttgttgtaatattatccatcttgagggaaaacaattaaaaacaaaagaaaatttaaggataaataacattgaagcttctgtttcactgcagaaaatttttggagaatatacagagagtacagcatttgaaagaccacttactagtggtgttgcttatgctttgaaagttctccactctgataggatgcattttgagaagcagcatgggtggacaattaagaaaatggaaactgagaatgaggcattagtacaagattgtattccagaaaatttggatccagcacctattcaagatgaatatgcaccagtgatatttgctcaagaaacagtttcccatattgtatctattgacatgatgtcagggaaggtgtgtcttgcttagcttgctgtcaccctaacatgatttactttttctaagcaaattgtggggcaatggcttaaactgcaaattttacattcctgtcaatgttcttaccatatttattctgcacaagtatgtatgagaaaactagagtgtgaagtcatcagttagaaagacttttttgtctgtattttctttatgcaatgttccaaaagaacacttccgacaaacctctttctgtcacttaagtgggattcgcttacttaggtggcaaatctggtggactgctctgacttggtgcatttggtatcatagaaatcggattacttttcataatgaagtgtttgatggtcagaaagtgttagaggaggctatatttttttgctggtcttggctgcgaaatctggagaaaggatttgacatccctttccatctttggtctagcaatttgagagaatgttttgtatctcaggggagggtttagtttattgtttctaggaactatcagaaccaggctggcttccagcttgttgcatcatgcttcaagcctttttggttctgtcctgtttttcaatagcttgtaactttgcagtacctcttgtactgttttatttctataatatatatacttatctttgctgatcaaaaaaaaaaaaaaaaattagatgcttggaacttttgtatacatggagtggaatattagaactggagatcactaaacagtatcttatataatttactttgaacagtgaaagttaaatgtggggtaaacagaatcaactacatacaagagttttacttatcaacagcaataaaatgactctgagcactggtatcacatgcttttcatgcctaatcagttgatttacattcatcttagtgacagattaagaagaaagaagactaggagttactattatctattgaattatttattaaattcctcattatctgtctggttaacagaaaatattttgttgcattgttacacaggaggaccgtgagaatattttgagagcaagggcgtctggaaagggggttctgacatccccttttaaattactaaagtccaatcatctgggtgttgtacttacatttgctgtctataacactaatcttcctttagatgctacactggaccagcgtatcaaagctactgtggggtaatcctacatctaattgtctactggttaaaatatgcatttcatttgtgctctgatccaccacccctaaaaggaaaacaattacagtgttatgtgagtattgttacctatttattggcaggtatctgggtgcgtcttatgatgttccatcactggtggacaagcttctacaccaacttgccagtaaacaaaccattgttgtaaatgtttatgacacaactaatgcatctgcaccaatcacaatgtatggtactgatgttgctgacactggcctactatacataagcagcctagattttggggatccgctacgcaaacatgagatgcactgcaggtttgctttaacactttaaaaaaattgtgttgtgtccaaagaattgaaatctcataccagcacaattccttcttttccttttcttttgcaggttcaagcagaggcctccattaccttggacagcaatcaatgcatcagtgggggtgtttgttattactttgcttctgggtcatattttttatgcagcaataaatagaatagcaaaagttgaggatgactatcgccaaatgagagagctgaaagttcgtgctgaagctgcagatgtggcaaaatctcaggtgtgatatatttatgggatttaggctttctgttatgccttggcacagcagtaaagttgtgtcttggtgacttgttgatcatgggttcggatctggaaacagcctctttgcatatgcaagggtaaggctgcgtacaatatccctccctttaccttcgcatagcgaggagtctctgggcaatggggtacgtagtttttataggctttctgttacgcagcacaattgttagagtgatgtcaagaatattgtaattcttgtcacatttcatatgtatattgcatcacatgatgatcatctttcaacatcaaagttatttctgagttctgatggtttataatttcttttacttaattaaaattaatatttccaccttgacctccaaggattgctttcccttttttgcagtttcttgcgacagtttcacacgagatcaggactccaatgaatggtgttttaggtaattgaaagtatttgttgttttcatagataaacccaacctgtcaatactcagtaataattatcagctgtttcaaataattttccaggtatgctgcaaatgttgatggatactgagcttgatgaaaaccagatggactgtgcccaaaccgcccacaagagtggtaaagatcttatctcagtcataagcgaggttcttgatcaagctaagattgaggcaggaaagcttgaacttgaagctgtagcctttgatccacgagctattctggatgaaattttatcacttttctctgaaaaatctaatgaaaaagtaatagaggtgagatcgtatctttccgctaccttagttttgtacctcctataatttgtacattaagtcttacatgaacttgtgttctctatacttttttggtgagtccagctggctgtttatgcatccaatcaagtacccaaagttgtcattggcgatcctaaacggttccggcaaataattactaatcttgttggcaattcacttaaggtttgcattatttcatgctgtattgttattttttgggtgggtttaacccattttattctttgcatatatcatgatgctggaaacatctcataattttaaacaatgcatcattttgtccttttgaaagtgtgtccctttactgattgatattgaaatggtgttcataagtaaattcatccatagcctggtgatattgttttttattcattatttctttacaatatcaccttatatatatatatatatatacgcactagtaagtgacccatgcaatgcaatgggcagacattgtaatactacataaacaatttgaaggatttatatgtttacctcccatctatttagactttgaaataatctttcgaatttttattttaaattagtgtattttcttatcttcagaataaaaaagaaggaatcttattggttatttatattctctattaatcagtttacttggtgcatttcagttcactcatgataaagggcatgtatttgtctctgttcatctggcaaatgaagtgaagaacccacttcatattatggacgcggtgctgagagaaggcttaaacttgaaccagaacgtatcaaacagaacatatgatacgttaagtgggtttcctgtatgcaacagatggaaaagttgggcaaattttaagcagttaagtggcataaatgagcctgaaattattcaacttctagtaatagttgaggacacaggtataggaattcctacagatgcacaaagccgcatattcacaccttttatgcaggctgacagttccacctcccgaacgtatggtggaactggaataggactgagcattagtaaacgtctagttgacctcatgggaggagaaattggatttgtaagtgaacctggaattggaagtactttttcctttaccggaactttcagaaaaggagaaagcacgtatctggatgcaatgcggcagaataatcattttggttcagagttccagggattgagaacattagtggtagataccagaaaaatccgagctgaggtcacaagatatcatctgcagagattgggaatgtctgtggatgtaacttacagtctgaattctgcatgctcttgtctatctaatgcgtgtaacaagaggtaatttgtcacttgactcactttagcagttgaaattaaaaatccaaatcagttgacagttgcgcacaataaaccttaagaacttacctatgtaagttctgtcattcttcaatagcatcagggcactacccagtatatttcatgtgtacaagtcatatactatgtaaaatgatttcagaatatagattatctgtatcacctgctttatgtggaatacaacaacaaagccttatcccactaggtgagatcggctacatggatcacaagagccagcctcacctagtgggataaggctttgttgttgttgttgttgttgtattccccataaagcaggtgatactgataatttatattctgaaatcattttacttagtaaacaacttgtacacatgaaatatatgttttttttcagactgacccaatcctcaatgcatgcttttgtgtggatatgaattttgcgtgatcttgtgaaggcttgaactgcttggtgttctgtaggaaattcgattcctatattgttattgttattaataaattgcattgttctttttttgctactggttgttttaatcaatattggcaattgcttgtgttcaacagtagtaactttaaggtgcaattagtcatgaagtaaacatggtgttttatttctagtttatatttgttgatttttttatttaaaaaaacttgtactggacaataggctattatttgctaaattactactactgtttttgttccttcagtatgtcgacccagttggccatgattcttatagacaaggatgcttgggataaagaatgtcatatcttatacacaatcaagaaacgtagacagaatggcatcaaaggggatccaatgaatttaccaaagatttttctcctggccacccaccttagctccaatgaacaggatgggctcaagtcagttggtattatagatgatatactgatgaagcctctttggcttagttctttgattcagtgttacagagtatcccttggcactgaaaacaagagagtaaataggaaaaaagtgtccaaactctggaatttattaattgacaaacaaattttggttgttgatgataatgcagtgaacagaagagttgcaaaaggtgttctacagaaatatggggctaaagttactgctgtggagagtggcagggctgctctaaagatgcttaaactgccacataattttgatgcttgtttcatggatctccaaatgccagaaatggatgggtaacttatcttcttattcctattttttattttagttttagttttctcaattttgaatgcaaatggagacactgttctttcctataagaatagaaccaaggagcaatgactggtctagtaagtttattttgtactagagaaaacacgtgaaaaacagtagataataattaaaggaactggtgccaaaagtcaggcctctacccttatttccttttgttaagaacctactacctagaatattttaagcacgactgatttttcccgggcctcatgcctgtgttgttaaactgtaaaagtgtccactcaatcttatgtaaatagatataatgattaggcttttgccttgtaatttatttattttattagaatgtatgaaactatcttgtgatttttttttatcctttaggggggcgtttaacttgtgtaagaaatatcctcttgggggctcagttagtgtatataagaaactttataaattccccaatctgcatgctatcatgttatccttaggtgtgatagatggccattttaacttgtgtaagaaataacagattctgagtgctttctagataggatcttacacctggaattctggatacatggctgagatataacttacaagtatttctcttcatcttaaatgatacagttttgaagcaacgaggcaaatccgttgtcttgagagtgaggtaaatgagaaaattgcgtgtgggcaagcatctgcagagatgtttggtagcatccctaattggcacattccaatacttgcaatgacagcagattcaactcagtcttccaatgaagagtgcacaaagtgtggaatggatgactatgtgtcaaagccatttgaagaagagaagctctacatggcaatggcacgtttctttaagtcagattcatagtgtggaagtttgaaatctttgataattagtgcagacagcctgctgacaagtgtggactgtgatgtgtagtatgatatcaattatcatcgaatgccatttgttggttttccattaaaagagctagcggatggattaattttggctaaattatgtccggatattgtaatggttggacatgccccagatgatgtgttcctaattgagactgcttgccagcatcaaagttatctattcagcatcatggatctcagctatggtcttgtttagtgatagtaagtaccatctttatcatcccaggatttttatattataagcgcatttcatacatatatatttattataattttaataagtagaaatggatcattgaaatatacatgtattacaattctaaatttcctttgtaattcaattatcttgagccattataggagtttaataagagtataagcctattcccgcattaataatttttgttcttatttttttcttcttttccaggatgctgatttcgagttcaagatattatcacttattgcaggacaggaggaggtcaacagagcataattgcgtttttgtgtacataccccgtttttgttcctgcttcccatctcttattattctttgtaaatatttatatttggagctagtaggataagataaaaatcttatagtgtcgacatcattatttcattttttgggggccaagatggaaaggaatgacagatctttgaaccctcataattttgtaagtaacatgtaaatcaaaattatttacatgataccagtagaatggcatatgtaacaatactttgggacttgtaagattccaacttgtcactttgtaactttttttttccttaaatattatcaagaccaaaaaatgttcaattcattaaagttgaatattgagctacaaggctacagattttggtaaatgagatacagcagaacatgaggaccactaacgaaccaagacttttttcccattgaaaaaggcaaaaaaagaagtggtaaaacagaagagtgtggggaaagggaaaataagggagataaataatcattttgtaattgagaaggaaaaaaaggtaaatcgtttgttgagttggaagaacgtctgacatcagataaagttaagaatataagtcttttgtgtgtgtttttctttccgtgattgtggagcacgtgacaaagtgtaaccgctgaaattagaagcgacgtcagaaataacaaataagcttttgctatgttacagctcatttctttctgtcaatgatgatatatgttattctcaagggagagccccaatttcaatgtgaccaaccctgcatgatccacttgcaagagaataacataaatttccttcttagccgttagaaagagacccataacttcctttcctttttgtttggctaagtatataagtaactacatggcttatatctttggtatctattttataaactctttagtctttatcaatcagcaaagcctctcttatctttttctccaaaaatggcaacattcatgctgaagttggtgcttcctctacttttcctgttcatgattcctctactccataaatgtaaacattgaaatgttcctagttacttcttttctccctctattgtttttaattggccttttcaccattagggggtatttttttttttcatttaccaaatgagggtagtatttaaaaaaattaccatttgggagtaagtcatgtcacgtggttaaaatttagtcgctaatttacgtcactattttagtcgccaacactttttgcgatagaatattgtgattttttatgtttgcgactacaatattctgttgcaatttttaacgaccaatttttataaaaaaaaaaaaaaagaagagtcgtgaagtagtgccacatggcacgacttacccccaaatgataatttttttaaattccatccccatttagtaaataaaaaaaaaatatccccgttgaggaaaaaaaacctttttaatttcattatcatatttaccgtttgattaaatagttaatctggtaagattctggattaaaattggacttgttatcagattataataatgagaataaagaacaatacttcattaaagctaaaattgattacatgatagattagatcttgtacatatatattcatcctcagcaaagtgttcatcttaaaaactacatttcatgcagcgtatgcggagtttgagcaatggtgtgtagctgatgagcagaccacggagtctgagttgcaggcagccttggattgggcttgtgggaaagggggtgcagattgtagcaaaattcaagtaaaccaaccatgctatttaccaaacacattgaaagaccatgcttcttatgccttcaacagctactatcagaagttcaagcacagtggaggttcttgctacttcagaggtgctgccataacaacagaagtggatcctagtaagtattaaatagattcctgataaccactcacttatttcctactttggtttaactaggacataatgcatgttcacatgacagagtcaatgagtgcaatttaaatgaacctcatgcttgaaggttaatctgtcaagtatagattttacaaataaatccaaaacctctaaactacattcaaactacttcggtgagcgtgcgtgaaacagaaaaattttgaactgaattggcacgagtaatgttctcattctcactaaacaaattttagatcaatcaactgatgaacaattatactttataatctcataaatagtgtttctcatctcatattataacctgaagaaattattcttttacacttttttccttccatctccttttacgccactccgttctgcttaaatggtctatgaaaatggttccacacacgagttccttttcagttgtcagggattggaacaatctggatttaaaattattttaagttttgcaccacagaagaagtgtatgaataatggtgatttataacctttttgcttaatgtttgtgcccaggtcatggttcttgtcactatgacttcattccctgatgacaaccgtgaatgaagacttataataactgcagcaaaaactagagctcgtgcctttgtgtgtttatgtgtcccaaactcccaatcaagcaatttttttggggcctttttcttgtattattgatagtgctgaaatcttacaattcacttgatctaggtcaaaggctggaaagtcataataaaatcttgtctagcaaactaacttgttatcttacaaaactaaattaagtttttcctacattaatgtacgtgtagctcaattgaactcattttttaacaaggtattatgtgtttgtataagaggatttccaagtcaaatagagcaaaagacgtgaatcaagttgttttaaacgtgcatccaaacaggcaggtatacttgttccggaccaaacccgggaggctgcttgacttaagaaggcatgcattcatcttggaccaacattgcttgcccctctatacgatcccttggtgggcatcactactaaaaaaaattctaataaaattgtgaattatattcagaaaatttaacttgaaaaaggatatgattcttctacccatgttatgcacccaaagtataaaatctctaattttttaggattattgattcttaacatagtatcattacatattaagtgatgacgagtttgatcacgtcactcttgttactattcaatgatactgatttttagtataaattatctctagctgcacttaacaaggactaatataaagtgattcatgatggaccacttttgttgtgattggtggaatattaattatttaacgagcagtcaagatgaaaaatatttgacctgttatagacggtggatattagaagttatgaatttagctggttcaacctttgaaaattaggtctttttgcagaccagtttgtttttaagtgtaaacataggttcggggcagagttatggaggaatgactaatgagcagagacatcatacatcctcgaaagactattttgtatataaattgtgattaaatgtaagtttgatgaactcttccaaccaagctgggccttggaccatttcattcatgaattgtaggagatctcctcaaattcaaacttgacaattagaccgtggtgatggaccttctcataattcaaaaggaatacgattgaaatatgacaatttgtgaatcaaggtagaaggatcgagtttgttatcgagagttggattctagaattgaaagtttaatcagtgggaaaacaaaaactagggtagaagagagagaaaaatgttcatttttctaatgtaatggtctaaactatggccctcacatttgaaacaaatcacttttatatgttaaagagtgagacagaaaagaagtttcctttttctaatgtgatggtctaaacaatggctcctcagatttgaaacagtgacattttaatatattgttaaagagtgagaccgaaaagaagattcatttttctattgtaatgatctaaactctggccctcacatttgaaacaattaactttcatatattactaaagcgtgggtcaaagagtgtattggtaccattggcacgaagttgttctatcttaaccagtgccctacaatttggagtctagcttggtgccttaaaattaaaaatggtgattttggtctgagtcccttggaaaagaagaaggacgtcgaaatgggaagatgggcgatgcaggcacaaatatggagatttgtgtgtttggtgtcaactgtaataggactactctgttactccctcagctcctccttcaacctttttgatgatgtcagattggttcatgcacaaactaagggggatggtgtcagtttccggtgaaccgatgcaaagattgggagcatacacgttggaagcacttgttgcacgattggctagcacagggacaacaatctacaaagcttttaagtgctacgaagcagcaaatgcggagggcctctcctacatgaacgtgctccatcaaatttggatacatggttgcaaatagagccattgcacaagctatgagagacgaaaacataattcatataattgacttccatattgatgaaggaagccagtggctcactttgattcaggattttgcagctaggcctagggggccaccccacatccggattacggttattggtgattctacatcatctgatgcaatgcagatggtgggaaataagttatcaaaacttgctgaggattttaaggtgccctttgaatttgatgttgtacttgtctttgcttgtgatgtccagctacaaaacctttgagttcaatccgaattttgcattcatgctacatcagatgccggatgaaagtgtgagtactcagaatcagagggatagattgctgaggttggttaggaaactatcaccaaaggtggtgacacttgttgagcaagaatctaacacagacactgtcgaattctttccacgtttacctgaaactctggactattacaaagcaatgtttgagtcaaaagatgtgaatgtgactcttcccagtgttgagcagcattgcttggcaagagatatagttaacaacatagcttgtgaagaggtgcttgggaagtggtggtcaagatttgcaatggctggtttcagtccttaccctttgagttcattggtgaatagtagcattaagaaattgcttgagaactacagctagatatagacttgaagagagagatagagctctttatctaggttggatgaatagggatttggttgcttctagcgcatggacagtgttaaatgagtgacaagattagaaccgggctttagaaggaggacaaattaagcacaacctgtccttaattcttatattttctattccattactatggaaaggctgcaataaatatgttaagaactaactgctacagaagcttctctggttggcgtttatagggatcttctgtgcatcagaagtgtacttacagagattctaactctcaagtcaatatttgacagagtaacaatatagtatgtaggaatagcatgtacctgatgaaggttgcaattatagaaacactgaaactgtccatgaattgtttagactaatataataaaacttgtcataataatctaaaactgtccatgaattcttagctgttctataaagtgagtgtcattctcattttaattgagaaatgtttacctgttttttagagaagaaatgtttacctaaatctgttatattttcagaaacatttatgtctttaaatagtaagtctaatctaaatttacgtaaaaaattggatggattacaaatttaactctttatagtttgtttttttactccatatattttactctttaagaatcataaaaataaaaataaaaaaaaaaggtaaatgggcctcaatatgctgacgtacagcccatgaataggtaaatgggcttacaagtattatttattcctttggattttggagaactttgatcagtggagttaggctttaaaaagtacttatttggacaggtttgttaaccagatcaaaaaggaaatcatgctttgttgacaattcttttaatatacctaacagagttttgttgtaacgaaaaatgggttagttttagctgaatttatttttgaaaatgcctttacttaactactattttgagttcgagggttagtgactgtttaaatatcatttgggttcaactaaacccggtcaacgctaattcaacacagaccttgctaaattgcttctgtgtttatgccgtggaagtgcaaaacttccgtaacgtggatcaaatgggttttcaaacacacccttaatcgtttaactgcatcagtagaaatatttagtaaaaaataccttaagtatattgaagttaaaataatgattttgttaacattaacctttaaaattgatgctaagaaaataaaattgaaaagtttttattgaaaaacatttattatattagaaatgtaaaaatcattttacattgtaattaataaagtatatttagagctgatatcaacaaaactatttactcaaataaaaaatttcccctcaaaacaaatatacactaagagtgattattagatttagaatttattatatatgtaaaagttattatttctccaacaaatttttttctccaaaatcttcacctccttttctctcgtacttttttgtctttccatatttctctactaacatttaatgatttatgattcctaattttcatcataattgcctattcatattaaactactttcaataattgttttggactctttaacttctttttctaacttacaaaaaatttctttattattcatgctcattaatgccaacacatttagctaaatgaatactcataatcatttaacttctttaatgttattattttttttcgtctcaccttatttcatcaattcaattttcttcaacctcttaattgattctttaattttcattctgcatttaatgattttttttttcacattataccttcctttttccatttgatgcttggttttcttcccaacacccttaattatcaactcattgcatttctttctatctttgtgttatgctctagtgagttttcttcacatacaccccatggaggtactagccattttttcttcatccccttcctttcttctattaaattctctgtagcatttttttttgtctctttcaaataagctagctacatcagcttccataagattgtcacatcgccaactgcatctcaatccaacattgtagggcatgcttcgacattagggttaataagagaaggtacaaaccacaagcaataagagggagcatgttggaatatgagaaacaaaagacacttttacattttttagttctttttttaagttatttttatcatttaaaatgttctatatttcactaagtcattattttttgtgacaatttgaatttgaaattcaggcatttaagcatatcaaattgaagtcaggcaacacatcttttcttcatttatgtatcattacttggattttttattctacctcctttgttttattaatcttcatattgtcttttaatttatttgtaatttttgtctctcaacttctgtcaaattgcattttcaaaggctacttaaattattcaattatgttattttgaaggccaaaatggatttgtaaagtcaagccatctaaattctgatgttccctttgaccccaacatcaaaaatgcttgattatgttttttcctgatattccccttaatcaaagttcaaggttaattttttatttttctatatatttttaagttttgcgagatgcaatgagtagtgatgcaggtttcatgagccagttttagtaacaaacaacaaatgtagtttacaaaattgagttacattaagaattggagagctttggatacaatgaacttataattctaaaacatcgtacaagtgcatgcgaagatattggttgcggtatgtgtgagtataaagtgagaaaaatatgtatttaatattttatgtattttgggggtattttttgatggatttggtaataacaatggttggaaaataaaaaaattggtatgttgtttgaggcaagtatgtatatacacaatttgtgtttttttagctttttcaaaactaattgttattgtaaaacaaatattaaacaaaattaattnnnnnnnnnnnnnnnnnnnnnnnnnnnnnnnnnnnnnnnnnnnnnnnnnnnnnnnnnnnnnnnnnnnnnnnnnnnnnnnnnnnnnnnnnnnnnnnnnnnnnnnnnnnnnnnnnnnnnnnnnnnnnnnnnnnnnnnnnnnnnnnnnnnnnnnnnnnnnnnnnnnnnnnnnnnnnnnnnnnnnnnnnnnnnnnnnnnnnnnnnnnnnnnnnnnnnnnnnnnnnnnnnnnnnnnnnnnnnnnnnnnnnnnnnnnnnnnnnnnnnnnnnnnnnnnnnnnnnnnnnnnnnnnnnnnnnnnnnnnnnnnnnnnnnnnnnnnnnnnnnnnnnnnnnnnnnnnnnnnnnnnnnnnnnnnnnnnnnnnnnnnnnnnnnnnnnnnnnnnnnnnnnnnnnnnnnnnnnnnnnnnnnnnnnnnnnnnnnnnnnnnnnnnnnnnnnnnnnnnnnnnnnnnnnnnnnnnnnnnnnnnnnnnnnnnnnnnnnnnnnnnnnnnnnnnnnnnnnnnnnnnnnnnnnnnnnnnnnnnnnnnnnnnnnnnnnnnnnnnnnnnnnnnnnnnnnnnnnnnnnnnnnnnnnnnnnnnnnnnnnnnnnnnnnnnnnnnnnnnnnnnnnnnnnnnnnnnnnnnnnnnnnnnnnnnnnnnnnnnnnnnnnnnnnnnnnnnnnnnnnnnnnnnnnnnnnnnnnnnnnnnnnnnnnnnnntatatatatatataacactattattcctttgtaatattttttctcttatacttctggacttttcatggtttcttcaatactcaaggaaccaaattgagacgccctgcaacaagagtcaaccagaatataatttgaggggaaaagctttctacggtctctgtttagaatttggaattagaattaacaggatggttcctccaaagtcaaagtccttggttgactctgcatttgaataaattaaataaagccaacattctgattaagacatcagacaaattacaaaaccaaaaccaaaagtatacattaattgaggagtaatcctagcccaggaatcttaccaaaagcatgtcttaattatggagttattcgattcgagtcaggagtcaaaacacactattctttgtaaaattatgaatttccttattcaaaactaattcttcacattgtaaacttattagtatttctgttgatcaaacgtattcgatccttgaaaattgagtagggaatataaggtgatgatattgacccaaaaaatggtttggtttgccagttaaaatttggtactatgcttgacaagtgcgcaattcatttcgtccagtccaatatttcaacttgaaattcccaaatatttagaactttaaaggaaagaaagagaccttgccaaacaaattcttttagtctagtgtgttggaatgccctcatcaaataactgactctgacttgctgtttgacgatttatatatggtaattggtaatgaaacttcaattctagaaaaatgacttattatcaacaacgaacgtgtcaagaaggtagccaaaaagtttagagaaaatataggttggctaacgtaaattataattaagtatcaagtacttgcttacctagtccctctgaaattgggtttaaacgtgtcatttgcttttcggctaatatgcttttcgtaggagctagtgtctttattctttactgctacacaaaagagagaagatggataatcaatataaaaaaaaatagacaatttgatatttgatatatgtataactcgtgcgcacaccctcgcatgccttagcattaagcaacttgtcaatttaaaaatatttatttggagtgatggatttggatgattttgaaattgagaaaggaaaaggctaacccaaaatcagatttggaacatacacacatgcaaactcctccactacacacatcccaattggaatttgccgcgtcaggcacaaataaaaatgtccgagtaaagaatatgttccaaagtaaagatgggcacatgtggtaagagggacccatatgttggccaaaatgcatggcagaacatgttgatgaacaatgtaaaccctttaaaatttacaaaatctgcaactttggtaattgattggataagaataggacaaattctgcagatgaaaaaggacagaacattaaggtaatgtatctcccaaaaggccttacatgggcggtgccatgacagcaaaactgaatacaaaagtcaagcgctctcattatggctttttggttttgaaacacactcctgaaacttggtaaaatttcagaaatgtaattggaccgagtttaagcctagccctacatagcagctaccgtgagtgtgtgtattaaacattggtcactctatatgagttcagcttcattttaggaatttggaaacgggggacaaatatttatcagcaaggcctacattttgtcttaagtatgcaatttacaagactctgcatcctaaagtactacaatcggcatgccaaggtcgagggacaaccttttgctatttgatcaagattttctgacaacaacttgaatgtctagagcccctcttgattttgataagcttatgcagtttggttaatcattaaagtttgatcttcaaagttttactgttactgttaggttttaaactagcttcaaacttgcatatcatatattatttttgtttagttaagcataactgggaaatgaattagttaaaaaaataatatgatatgatataattgatagataattatgtctcttaaatatgtagttaggagttgatctctagatatgtgtgtttataaaagaacatttgtttatacattaaaatcaatctcttaaataaattttaatacatcaagagattaatctttaatttttaattgaaatattctaatatttttttaaaaaaagtcaaaactgaaatttactctaaacctcccatttatatgaatgaattgaattgatcaattattgaaaactgctaagtggagaatttttatggacttaagaaaagggattattaatttctaatgtcacatgcctaataaaatgaactccacttaatcattaggtctgattgtcttttaacttaggcatgactcgacctaaaaggacattaattagcagagagatttcactcattattggttagagtgtgtagaatatatatggaagaaaaaaaaaacgttgcttcagtgttgtttgcactgttttttttattagattgaagttttatctcaataatttatataattttttaatacaaactttttttacacaaattggtaaggtggaactctaattctaattagcaaataatacaaacagtatttatagaattatatataagttttgtacaacataattctcaaagaaagctcgaatactgtcattcgctatcctgtaggttgtagtagaacgtgtgtgaaccgtttcttgtatgcatattgcataatatggacacacaagtatttctgctcctgccttaaccaacgccttcaatgttaagggctactattcgaccaacccatcttccttactttcacatctagctgaaaacaaataaattcaattatgataaataaatatactaaataagtagaaaatcgtgcatatgcaacagtattgcaagttcattctaagagttcaagttcattttagtgctttgggagtgggggacaaacgcagccctacattcccctatgtaaggcaagcaagttatagggtcttctagcctaaagtgctattctattgccatggccagatgcaagcattttgctcttttgattgagatatctaccaatttcttgtctccaactgctcatcattttgatatatgcacgttcgcaaatgattagaggacagaacatagaattggtagtaataagattaaatcaaatcaattcaaatttaatttgagactcaaatttgataatatatttattgaatttgctttatgaatcaaataagttacacttatttgaaaattgaatttattatataaatgagttagatttgagtaatgtataattcaatttatttgatttatagttttaaattgaatcgagttaattgatctaaattgaattattcacaaactcaaataaaatattatttaaattaagtaaaaggtttatattgaactcaaattaaattttgaaccaaattaatttttattaaaaagagacgagctaaacttagttccattcatttcaactcatttttaacactaagtggtaaagttttttttttgttttgttttaccatatgataagattaatgatttataggtaaatgtttgtgcgttataatgtactaaaataaagaagttttaaaatttgatgtaaatagaagaattaaacaatgaatgttggggatgagacattcaccagtaagcttaggttttgggtcttatttttgcaagctcaaacgtatcttcttattcttccagatattgtacagagacaacaatgtgaaagtcgttggagaagaaaaacagatctcataacgatggctacacatgaagtgagcctgtggaaataggtgttgagatagagtcatagaactcatctcctaacgttcggacatgacaaataaataccatctagtcatgtggtagttgtcaagttttgttttgtccacgtctgagatgcgaagtaatatagaagaaacaaatattacattggacaaaaaagtgaagagtaatggtacattatactagtttggtatgagtcattgacttattaaatttgacatttggaattaattatgttggttctaatcttattatatcatactaaattcccaagacttatctcttattatcaaataattttaactcttcaacaataaaaatgcagtcaaccttggtgaaatgagtagagaggggaaattactctgtttttatggacctgaaagggagtttcaattcgttgaagttaaaacatgccattgttagacgactttaatattttgattagatttatactactttatgaatgaagtacattaaagaaggataacaaggatagatgtactgttttacttttgctctttttttaaccatagtattgtaactaacaaaattgagtcgtaattgttgaaaaaaattatcagtgctgaaatcaaattaaactattataaatattaagaaaacaacaaaggtattacaataacaagcaaacctttttttttaactgagttccaccacataaatattgaaacaaactattatatatgtgttctttcaaatttattatcaaataagggtaagaaacttagacttgaaggccgaaacatttgaaacaacagaccaacttcagaaagttgattgatggccctaagtccaggcgtaaagcaaagaacatccaaaactccatcctaacttcaaaaggccaatccaaaaattcagcaagaattacgtgatggcattttatataaaatgataactaagttttttgttttctttctttttccttttcatcctttcattttttttttcttttcatttcttaatactcggatttatgccttttatatgaagtctcattcaaccctatattcacttaagctaatcgtaaaagaaaaacaaaacaaaaagcaacaaaaaataaaaacggtttggtattnnnnnnnnnnnnnnnnnnnnnnnnnnnnnnnnnnnnnnnnnnnnnnnnnnnnnnnnnnnnnnnnnnnnnnnnnnnnnnnnnnnnnnnnnnnnnnnnnnnnnnnnnnnnnnnnnnnnnnnnnnnnnnnnnnnnnnnnnnnnnnnnnnnnnnnnnnnnnnnnnnnnnnnnnnnnnnnnnnnnnnnnnnnnnnnnnnnnnnnnnnnnnnnnnnnnnnnnnnnnnnnnnnnnnnnnnnnnnnnnnnnnnnatctattgtaaagatgcttcttataattaaatttgtacaaaccacaggaaaatctgaatttggcattataaaaaacaattaaaaaaatggctaaagcctaattatcaccgattatgaaaattcactttacctaccttaatgcagttatcgcccaatccttttcgcttttaataagttgaagacgcaattatgaaagatatcctccaggaatgcgcactcttcaataatttgagttagcagtaactttccataggctgcatcattataacttcaaattggattaggataagaagtagtgattattttaaagctttagagattctaattggatatttctgagataagttcaatggattatgaaagagaataagtgcaacaagcaaaatacatatataaataaatatacagattttaaaaaataaataaattgcaattactaaatttgatagaaatggagatcaagtgcatgttagctgaagtgtaaggcactacttacatcattggtgccactgcctttattgtaaggctctctctcttctaagttctaactcaaccgtgtggtgtgggacatcatctaaatgctacctttttaatctcaacaattcactgatgacttatgtatactattgatcgatataatttgaaaataaaaagataatatggtcgttaaattacgaaaacgaccttaatttgctgacaccctctttatcttagtttnnnnnnnnnnnnnnnnnnnnnnnnnnnnnnnnnnnnnnnnnnnnnnnnnagttggcacaagctaagataaaatttagaagcacctgaaataaaaaagtgaatctaaccagattaatacatacatgcatgcacaagatccaacataattactacttatgaatgcaatagatttgtcacttctcaagatttaattgcagacaggtacctttgtataagtcaggttctgattatttggcacttctaaagtgaaaaaagtgtctaaagtgataaagtaggagcgcaattactgtcgaatttttaattaaaaatacgttatgattacatggtattttaattttaatccagagtagataaattcttgttttctcactttatatagtttttcactttagaggagttaaattgatagtttttagaccgtttgttgtgtgtgaggtaagcaaaaagtaggaaacatttaattactatatataacataacataatctacaacgaagtggggtttcctgtgtcacactcagttacatatgttctttccgtataaccataggtctatatacctttgatcccttcgaagttagtgcagtttatatcagtttctcttgcatagatggtcacggatgatggttttcctgagattaaaagtgtggacaccacaccaacctatattggttcggcttattattattattattctcattaaaatacttgtaacaatcactcccaaaatttgaccgtttatttgaaaattagagaacaactaagatatacacatttctttttcacaagaccaaataccatattgctcgatatctttttccacagtttgaagtgtgaatcctctctcaagacttccgatttcattcatctctagttcttattttcttgcttttgatgtgctaataatgccatcctccaaataactgaaatgggaaatttttatttcatgctactgcaatcccctgaattgcatttgcaaactgttgagtctacctttctttgagcaaactatggcaaagataaatatcctttaaatcttagtttctgttatttaattcgtgaggatctatcaccagtttcatgtcaaactatttctcagcttcaatttgaaagaattaaggaaaaatatcactcctggctttgattttcaaacaacttactgcaccactgtatttcatctaaacaactactcttaaattttctcaaatcagagataagtttggattttgctagtggtagaataaatggtatattgagcagtgacactcgaatttctatttaatgtatcaatggtttggggtcaaatgacaatggattttcctagtcgtgtattgtccacctatgaccaacagaaagaaaaatacactcgtttttcaaaactataacagaagctattataacacaaagtaccattttttgtagctaataataatagttaactacaatcgaccgatgagatgagatgagcatgtcatttctctgatgtcgttgctcatacatgtcgtgcaagagatatcggtccagctaaaccaccctggatggatacacatccaaccctagtcattatcatttatcattattaattgtatattattaatatttgtctacaataattaaacaataatctatataattaattcttattatttgggggttgttacttcaaataacttaagtttgttggccgaggtttttttttttttcattggttgacaaattaaattaaacttcactaccagtactcaataccgtattcagcaatgattttcacgatgtgaaataagacaaatatatgaataataattttaaaaaacgagagaaatatttgagtgaacatataagtaataaataacttgttaatcatttgtctaagtagtgaaaaggatttaatttggtttcattaaatgataaacgttttatgattatgaacagtttaatacggcatttgatattaatttgatttgagttaaatgataaaatttactgatcattgaagtagaagcagcactgcatttcggacaaaaaacaattcatgtatgcagatacaattatgcttctgtatgttgaatggttatgtctttagtcaccaaattggcatcaaagttggtaagtcattaatgcaaaccatatacagaggcggaacttgggggggggggggggggggnnnnnnnnnnnnnnnnnnnnnnnnnnnnnnnnnnnnnnnnnnnnnnnnnnnnnnnnnnnnnnnnnnnnnnnnnnnnnnnnnnnnnnnnnnnnnnnnnnnnnnnnnnnnnnnnnnnnnnnnnnnnnnnnnnnnnnnnnnnnnnnnnnnnnnnnnnnnnnnnnnnnnnnnnnnnnnnnnnnnnnnnnnnnnnnnnnnnnnnnnnnnnnnnnnnnnnnnnnnnnnnnnnnnnnnnnnnnnnnnnnnnnnnnnnnnnnnnnnnnnnnnnnnnnnnnnnnnnnnnnnnnnnnnnnnnnnnnnnnnnnnnnnnnnnnnnnnnnnnnnnnnnnnnnnnnnnnnnnnnnnnnnnnnnnnnnnnnnnnnnnnnnnnnnnnnnnnnnnnnnnnnnnnnnnnnnnnnnnnnnnnnnnnnnnnnnnnnnnnnnnnnnnnnnnnnnnnnnnnnnnnnnnnnnnnnnnnnnnnnnnnnnnnnnnnnnnnnnnnnnntagtaaaaaaagaaaaaatattaaaatcataaaaaggaaaaaaaacataaaagaggaaaaaatatatatataaaaaaggaaagaaaatgtaataaaataaaatgaaaaaaaaagataacagaacaagaaaaaaggaaaggaagatgataaaatgaaaaaaataataataaaaagaaaaataataaagagaaagagggagaaagaatactataaaagggaaaggtctgaacacaaaggaaaaaaaagaaatacaaatcccaagagaacataaggagtcaaaaaaattgtttcatttgataaatcagtgaaagaaaagagtttcaggtatctccttatttctttccttttttctctttttctctttcttcttcctgttgttattcttctaaaataaaataaactgctatttgtgtctcttgtttctaaaataaaataaaatactctatcaatatgttggaaggagaggtcgtgctccgaaatgaacaagtgatttttctacttaaaaattttatagggtaaatatcttttgtgctacaattgattatcaattacaagaattaaatagcaggttcaatgataatactgttgaattacttgctttaagcatgtctttagatccaagaaacaagtataagtcatttaacagtgatgatatttgtaaagttgttgataaattttattctagagatttcacataacaagaaaaattgcatttgaagatggagttacaacattttgagcttaacattcctaaacatccatatttgattaatttatcaactacatctgaattatgtcaagggctagcaataactggaaaatctatcatttatcctcttattgatagagtgattagacttgtactcactcttacaacaactactaaaagatctttctcagctatgaagataatcaagaccagacttcaaaatagaatggaagaccaatttcttaatgattctttgattacatacattgaaaaagaaattattttgagttttaacacgaattcaattatagatattttaacaatatgaaaacacgtaaagtaagaatcaagtaaagtgattttaatttctgtaatagtttttttttaatattaggtttgtattgtcttcaaagtatttttatttataatataatttttttatattcgccctctctcaacaaaacttttggttccgccactgattatataggaggtggtgtggtcatgaaatgaagtactgaactacggtttttgtagcagtaggtagttaaatttggatgtatgatactactcaagtgtacacaagaagaagaaaaaattaaacaaacaagtatttgttttttctacatattttcttttgaaaaagataggtattaaaggtccaagagaaaatgaatagataagtagatggactgaaaaggaaattgaagtgaagctgctcatgctaactcactcaaaacgggccacgtgtgattgtgaggcacatttgtaagagtggcattgatggcagtatttgaccaagcatactattaaaaaggggtattcctgtcatttcaataaaaagagttgtcaccgagcatcatcatattaacattaaccccagccaacggtttctgtgtagtttctataataatggaagggcaatttctccttcattattttatatgcatatgccttagttttttctccattggaatagccttgtcttctacactcccccaagctctgagattctaatcctctgtggttttccaacctcagaatttcctcgaaacttggtaagaaactggttttatgttcaaaaacttctcaaactgaagccatttaattcatggcttcatattttccttgaaaatttgcttcagttttgatcttcattgatttacaagggtttctccaaacggtttggtgaagtaaaacatattctgttaatacttcttgcccgtgaactttttgagttctagtgttttagcatttctgtttatgatgtgcatggtttttgcataaatgtcaaacttccctttgtactctttaattgtttcttaaccaacttctgcaatgagatgtgagctttgatttgatgtgcatttttctgtgaacctatctgcttgttacacaaattttgttttgatacacacacacatatatgtgtgtgtgtgtgtgtgagtactgtataaggggtggtttgattaaccttgtcttaactaggtgttgtcagctaacaacatctgtaacttcatcaaactcagaaagaaaaaaaataaaagcacttctccaattgctgttactgcttttgtggtttgtaaatctgttctgtctgacattcaagctttcttcttttcagctcagccaagtgaatttagttaatctagtagaattggaaattttcttaactgtgatttataaacattatatttttcattagatttggttgagcctttttccgtatgcaaatgttaattctgcagttttttagaatgattgacttcattcaaatgaaaactaattcaatacaatatgtggggccatgtatagttctgctcgtctcatcttttgaattttttaatggaaattagatgttcatgtttagataattccctttccctttctgaatatctattcccttctctttgttcaattccgaaatatttttctttctttattggtggagaaaaatcaataatctttagaattggtcgtttatgaagtttcttggaaattcttctaattgattccatcagttcttcattttttgtcataaaaaagaaaataggcagagagatgaattgtttgacttggtatgagagtcaagttgttgataatacacgatagaaggagaagaaaaaagtaaactaattttaacagtgcgctgactctgaagagtgcctaatttctttaagacaaaaaagttgtccttatattctggttcctgtcaactgaatatttcagcctttgctttctatctcttcaattcattggaagcaagttgaaagttgatgatatgatatcactgatgacgttgtgatttttccacgcagacagcagattatgtcaaatatgtggtttataacctcccagaagagagaaccttgacaactcaggactatatctttgttgccatgagtatcaattagcagctttctctaggccactattgtccattgttctgcttctacatataatctgctggaagagatcacttgaactactataacacagttgagaccaagtcgattctataatgcaggcatcagagcaacatagaagttcaagtgtgtactatcaaccattacaacaaattgaagcatactgcttgccgcaatatcagactcgaaatcaacagctatactaccatgatggaggccatggaactcacttttcaactccaagttcttcagaactttactgcactttggagtcatcttctgtagctctttacaactccccttcaactgttagtttctcacccaacggtagccccatatcgcagcaagactctcagtcatatccacctgaccagtatcattcccctgagaatacctatggctctcctatgagtggctcctgcataactgatgatttaagcagcttcaacttcaaacacaagctcagagagttggaaagtgtaatgcttggccctgactctgataatcttgatagttatgatagtgccattaacaatggaaacaacttcgttccacttgagatggacagttggagacaaacaatggtggcaatttctagcaaaaacctaaagctcatccttattgcatgtgccaaatccatttcagacaatgatttgctaatggcacaatggctgatggatgaattaaggcaggtggtgtcagtttctggtgatccggttcaacggttgggagcatacatgttggaaggacttgttgcccgattggccgcctctgggagttcaatatacaaatctttaagatgcaaagaaccagaaagtgctgaacttctctcctacatgcacatactgtatgaggtttgcccctacttcaagtttgggtatatgtctgcaaatggagccattgcagaagccatgaaagatgaagagagagttcacataattgatttccaaattggtcaaggaagccagtggataactttaattcaggcttttgcagctagacctggagggccaccccacatccggattacaggtattgatgattcaacgtcggcttatgctcgcggtggtggactacacatagtgggacggagattatcaaagcttgctgagcattttaaggtgccatttgaatttcatgctgcagctatctcaggttgtgatgttcaactacataaccttggagttcgaccaggggaagctctggctgtaaattttgcattcatgttacattacatgccggatgaaagtgtgagtactcagaatcacagggataggctgttgaggttggttaggagcctatcaccaaaggtggtgacacttgttgagcaagaatctaacacgaacactgctgcattctttccgcgtttccttgaaactctgaactattacacagcaatgtttgagtcaatagatgtgactcttcccagagagcataaagagagaatcaatgttgagcagcattgtttggcaagagacttggttaacatcatagcttgtgaaggggttgagagggtggaacgacacgaggtgcttggcaagtggaggtcaagatttgcaatggccggtttcactccttaccctttgagttcactggtgaatggtaccataaagaaattgcttgagaactacagttatagatatagacttgaagagagagatggagctctttatctgggttggatgaatagagatttggttgcttcttgcgcttggaaatgagaactgggcaatatgtgactcctcaatgttcgagggggaacaaagcataacatgtccctcttctttttctgttccattactatgtagaagttaatgagaaaggtctcaacattaaatccaatctaattgtccattttctgtgtttcaagaatttcaattgaaattgtatgtagcatttttctttatcagcaatattaatctttcatttcaaaatcttttctggtccctgaatgtttggcttattagtggcttgggaaagtgatttcctagaatattagtagagtggcttttcgtagctatggttccaacattgctgtccattcactttattagatgaaatagatagatattttactttaattaaaataacccacgtggcctcatttaagaaagataagttactagtaatttactgaaagaaaagaaacacagctgtatcagattctttgaaatttatctttattctgtgggggaggaataggcattaggcaatgggactagaattaacttggcacaatcactcctttcattggttctgggtctgcgtactcgagggtttgtggcgatgggatcgtttcgttgctctggtggaccaacctgacagaactttttttttttttttttattgaaaaatatcaatttattgattttgttagaaatgcagttggcgttcaaaccccccacctcttcctcttcccttcttcaatcatcgagtcaaccttatatcttttaaggaaaattcttgtgtccttctccataaaaaaaaattcttcttacaggaaagtggtataccattgaaattaggatgtgacttgcatcatcggtggacctcaacatttgcatgtctcttggtgacggaaggaagaaagaatttcttgcaatttgacatggtccaacgtgacttaaaaaggtggactttgacaaaataatagcagtgcctaataagataattgcataaaacagaaaagagattctaagctatccttatggttttagtacccaactcgtgacacaaaaaaatatagacgatttttcaggaaggtcttctctggtttacaagtctttctattatttttaattcaataaaaaagagaggtaaaactccaaaaacaaataatgtctaagaagagaccctcgcactatctcccaaaagcatagactgcaccaagaatgagcataaacgtaatggatatggacccataaaattctcagcctccaaccttgacgccaattggttatcctgtttgcttggacaaagtatgagaggagtggctgtctaaatgaaccacctccaggctccaaccccaagatttttattttttattttacccttggataaataataaataataaaataccaatccaatatcctgttatatttagtcgagcatcgatcattacattaaagaatgaatctaaaccactgcaccaacaatcacacattttaacatatggaataacttttgctatactcaattactgcaattctgcaacgcattttgtaaatttacatggaagaaaggaagattaaagcattagtaggcacaaaacaagaattacatgcaaatagctgagtatgttcaacaatacattagaattttagatatatgtgtacgaaaatgtaaatcttatttaactcaaataataatggtatacaagttatgatatcctccaatgtagtattaattgtaatttgcatatttagtcaacctgcccaaagacaaggagagagctagaagtagagttgaaggttagagtagaaataggaattataatcccacagtatatctgtaaagcctatgtcattgtcaaatatttatactcttctgtaactaggtgaccctttcaaaaataatgcaaatttagctttggaccggttctgcatcagctgcggattgcttgttaaattcactttctgtactaggagtatcatgaacggcaaccaccttaaggcaatccttacttccttctgatataggttttacctcacctttcagctgttcatttgatctacacagaactccagaacttgaatggcatataacgtcattgctgacagaatcgtctttagtagctgagttatccttttgttgttcctcacttaatttaatttcaggaccctcattagaaaggctgatcacacgaaactcaaccatatcaccagcctttgacttagtagtcgactcgccaattaggtcccctgtatcatcagtattaccctcagatttgtttcctgccttgccattagtggctgttgtgcgagtatttgtagctgcattctgagtgacagtccgtccagggggaatttcatgatcatgctgtccctcataggtagttattacagtttttgaatcatgagaggccctttccacatgctttttgacagggcatccaggattcgagcatcgataataacttctggaagagtggagagaaaatgcagtcaaattaatttaaaacatttgtgaacactgtatccatgtaagcacagcatagaggggctgagagagcaaataaacatctaaaaaagtgtaaccagtgggagaagaggcaacttgacaaatgtaaccagcagatgaagaagttgaagttccagaggaatcggtcattggcagatacccaatataccagttcagaacaaaagcattattgatacaattgccttgcttttttaaaatgctaaagaaacacaatacttctaataaaattgttcatctatgttcaaacatttgagagtttgggttgcatttcaatacctggttagaactgctaaatcattgttaaacccataaaaagtgtgacctagttgtgcggacttaagtattagccacagattataatcctacaaaacgtgcatgtgggacacaatttgaaaatgatataaaaggaaatactataatcacttcctgttggtttcaagaagacgaagaataactcaaacagatctttagactggaagctaatgaaattaatttatagtcacaactcacagggcttcaggctagctcatccaaggcagaatgatataatatggatcaatataaacacattctaacacacacaacaacagcagaaaataggactgcattttgaaatgaaaagttaacatgtaccttgggtttgtattccctttaactagcttctgcccatatttgcgccagcgatacccgtcatttaccagatcaacctcacttgaagtctgaacaacaacaacacgagattcccaagttgacatgtcaactctagtgacatcagcattactattgtctttcttcctgcttggtatcaatttggcagtaaaggttagctatcgcatatatatatcaacacaaattttaaaaaatagtgatataacgtacagccgctttgactcaggttccttgttatcatgaaccagattctttgccttagtcaattgtaaatgtgcagctttcaactcattaactggggaaacttttgcaggaggaaaggattgtaaaggcttgatctgttgaggcatacatccatgctcaacggatgctttgtcttcatgtatgatgtcaaaaaatacattaagatctttcctacagaggcatagaaacaaaagtacagacaaagtgtactgctcaccttccaaattggctagagagggtttgtgaagtgcttgttcaacaacaggcagaacacactcaactggtactgtgttcaattgaggtctaggatgattatgctgaccgatacaaatggaatccgtgatatgtccattatttgactgctgcaattgttttttggcctggcagtttggatgtgtacacttgtaatagctccttataaattcattccccttaacatgtttctgaccatattttcgccagttatagccatcttttgataccttttcacgtattatagagggacattcctgactggactgcgatcgaggcaattcatgcgaaagagtatcagggctctgcaaaggtttcccaagtggtaaagagcatgtgcttccttcttgatctgattccaaggcacaagcagtagcatcagaatccttcccttcatttttaactacaatagaaagaatacttgttgcttcctctggtttggacagatcatttttagtatcatgaccttgtgacaatgtcgtatcactatcaggactcacactctgctgcaatttatcagaagggatattttgatccgcacttttgtctgtagaaaccatgtgaacctttttctaatatatcagaaggaaacaggtctagtttcattaactgcttccatgaatggcttgaaccttgaacaagcaatgcgtgcttgtggctgctcaaagctaacacacgtttaaaaagcaattagcaaaacacaaatttcggtgccctgtgacagcaatatcatgaatatgaatagtgtgggtcgagaaaattttcttttcatacgtggttcctttattgaacttttagcagttttgttaatgccaaccctgttctatggaacaaaatgtcgaaagtttatattggaataaaaaaagtagttattgtaaaaactctctttctatttttagtcgctcaacagctgatcttaaaaaaacccaacttttattagtagaagccgcaagataaaactcactttaaacatgtgaaaccatttcagccatgatggaccaaatagaatatctacatacatattccaaatcggagtcttaacgcaatactatatacaaacagacacatgcataaagccatgttaattaattttcagatagaaaggagcttaaatctcaaacaaaaatcaatatccagctcctattttgagatcacttttaccatacagtacttaacgtcttaattactagttgaataatccaattaattacaaacacaacagttacagagatagcttattctttaatttgtgtctgaaattagccgaaccaaatccagaggaaagagagagagagggggaggatttcattgcttaggtctcaaaaaaaaatgctattccaccttctgtggaagcatccccaaacccacacaacagctcatacctcggttacaaaaaaaaaaagacccacacagattttagtatatgaagattaaaataaggggagaatttaaaaagaagaagaaaaagaagaagaagaaggaagaattgaagtggacgaaattgaatggaatatataaaaggagaaagatagcacgtgggaagcattacttacccggaattgagacctcaaaattggtgaagaggaagtgcgagttgagtaaacaaaacaagtgagggtattttggtggttgtgttgcagaagatgtcgtctatgttgtgggtttgggtggaaggaagcaatgggagagagtccaatgtaacatcctcatttatttgacccaaaaatcaaggcaaaggggaacaaaagtcctctctctctcctcagtttattattaattttaaagtgacacgctgacacaaacacacacagaatatgtctttctgtgctttcatttcatttgtcaagtcttccttcgatggttcttattttttctctcttaacccacaatttggatttgggcctcctttttttctctcactgagctacattcaccattgggcttatcatatcatataaaatatactctttttttttttgtttatttgacctatacaattaattttttttgttgatgtgacttttaatttattatgttttataattattttacttttgatatattaagttttaaaattttgatcatgatcttctatattttcaaaatgtaaagttccttcaccaaattggaatacagaatcatccccaaagatctcgatcaaagcatgcatctgcaaaacctgaatacttctagaagtaactggcaaaaaaaaaaaacacctagtagagaaacccaatcctgagtgaaataaatactgcgactttgaacttttccaacaaaatcatcgaaacggtagtactctgttaacttttaaattttaaaaacaaacataatgatacatttcgaaaacataaaagaccaaaataaaaattttaaaacttattgtaccaaagcaaaataactgtgaaacataatagatcaaaagtgatatcaagtcttttaaaataattaactttacacagtgacggctaaaaatcatcactatctttattttattttcaaaaaataaacaactaaaaaattatcatatgcccaatctcttctagatctgaaaagataaaaagtgtagcatcacacagatcgaacgacatcaatacataatttcgttaaaatcattgaaaattcttatacttttcattgaaaaactaaaacctttcatacaactatgctattggaaaaaatagcaagaaaaataagagtgagagttgtctttataaaaacatgaccctaactcgctaattaacctagatctgaacaagaaagacaaattgtgactctttgtgaggtttgtgagcaagacctccaatgtcgtgcatggttggactgggtaaatagaaaaaaaaaattatagtcaatttttttagtaatagcataaaatgaaggttcttcacatttcacattatagtttcgaggacttgttatctgacatctacaattgggttggacgaaaacaagcagcataaatatcactcaatgatgcatttcattagaaaataattataaccggatcgtcccatccaaccttatccacaaccaggcgctattgggctttctttttctcctttgtcaaacacattgttttcgatggtagcgatgagacggtttttgttgttaggtgaggcggcattccaacagcataaggaggttgtggcggagatgaaagtgggaacgagacaatgatctttttgagtcggtaacaagaggcaaaacgacagaaagagaaggaacccttatccattgtgattaagaataattggtgaataaaattattatcgttattaaatgactaaatggaatgaagagaattatgattaagaataattggtgaataactatcgtcatgtaacgcagtggaacgttatgcattgcattttagagaattatgattctattttaaatgtgattgggattgttatagcttatggtaattagaatttatagtgacttcttgttaggctctactatcacattataaaatccttcgcaagaaaattatattaaaatcaattacaatgattctttgagttagcctctagccccactgttattggtggcatttcgaaacaccttcatgattgttaggcattgtaccattgttaaagttgagcttttaggctatttattagagcatcgacttaactaaaagtaacggtttcattaaaggagcatagtaagtgacttaataatgattttcatcaacatgaaaattcacattcaccacccttgccatgttttcattcaacaaataattcttatttaagttcagctgaaccctactcctataatcacattttcaaagaaatcaacttgcccttatgcatttatgaatgaccatggagttaggatcaaggttctttatattatgttctagactttttgtgtatttcgctactagttgattattcaatgacggtctatatttgatagtttttgtcttgttttgaccgttatgcccttctcataataaaaagaaaaacaagggataagttttttttttttatagataaatcttaataaagaaattagaataacttgttctcctttttattaaaaaatatttattataattttaattatatataaaaatatttattttatgtacctaaaatattaattatatcaagaaacgtgtatttaggaaaaaaataaaattttatataaaaacttacttttattgtgaagataaaacagataaatacttatttataaaacgaaaaaacacggtttgggagaaaatctgttccatgttccaatctcgctttgttttcgtgttgaacctgaaagagaatcttctccccatcaaaccctaaccctaactcacagatttgagttttgatcacacaaattcaatcaatcaatctttctcttcaccctgagaaaatgcttcaatctccagggcactcgccgctccacatctcgtcgccgtccccttcaatttcccaggtatcggcgcaaaaccctaacgatccaccatcatcatcgtgtgcgaagcaccctgcggtgctggacgaggacacgtacgttgaggcgttggagaagatcatcgagcgcgactacttccccgacatctccaagctccgcgaccgcctcgactggctcgaagccatcaaaaccggcgaccctgtcgtcattcgagaggcccaattgaagatcctcgaacgccgcgccggcacagcaaaggtaaccaatcccaatgatacttctagaacaacctcccacacacccggttccacattcattagaaatttcacacctctcgatgagttcgacggaaaaccctctcaaagcccccgtcccccggttctcgaggctaaagagggggagaataacgatggtggggttgatacttcgcttggcctcgatcaatttatgaggaggtacacgagtgaggacaatcatagtttttcgaagattatagagaaagtgaataagaagaggaaagagaggtttgggtatttgaatgaggatgtgcagggtattgaggatgtgaagagggataggattactgatggttatggaacctcttatcagcctccgagtacccttgaagggtggaattacactgccaagaatttgttaatgtatcatccagctgatcggggtgaggtccctttgaccgaggaggaaagagcgaatagaattaaagccgccacgaaggagatcaatcgcgggaacactagatttcatggtaaaatgatggattctaggccgaaagatgatggaactattgaggtgctttatgcgccagttgctggcactacgccggcgcctatgtctcttagagaaggggataagttaaagaagtatgatttggatgatttgaggaagactccaaatccgttttatttagaatctgggaagaaagctgagaatggttatagctttgttaagacaccgtcccctgctccaggtgttgatgaatccccgtttattacttggggagaaattgaggggactccgctgaggttggatctggaagatacgccacttgatattggtggtagtgctgatggtcctcattataagattccttctgcaccggcaagagattcaaaggcacattctctttctagggaggctgcacgcaagataagggagaggtcaaaaatgtttcataagcccccgttggcatcaccggttagaggggggagtgccagtccaagcatgcgtacactgtctcctgcagctcagaagtttgtgaggaatgcgtttgccaagtcctcgtcttctgttgatgaaacacttcgggcaagttaccgtggttctactcctgctttggctactcctagaagtgttagtaggagtgtgtcaaggtttggtcgtgatgggagcttggcttccaggtctccatctgttagagagggctccaatcctcccttgtgatatgttgtaacatattttgaaaccatgatatgctgtatgtctccccctcccccttgatgatgtattaaagttgcaccgccatataaatttggagagaaaaaaaatctgagaataataataaactttgcttgctgaattttgtaacctcaacttagattgttaattcttgtagttttagccttgctcagcgattactggttgtctatgtgcaaaatcttcttgatagaagttcttcagtcaattcctctatgccaaaggcattgttgtatattggattaactacgaagttactatctcacttttctgcctatttgagagattttttatgcgtctatgtgataggttttgttcttattgaatagtttcttcacgtttcttttttgcataaaaaaagtaggttctttctggtttcaccatacattttgcagttgccattcatgtagccaaatctcagatgaaactgatgaatctgagtgaatggcagtttgatgcttatttttatggtatggcctcttagagtaattatccgataaaggttatagtcgtgcaagaattgagcctgcatgtgatgtatgtacattgtacagatcccttttcagttcttcaattgcatttacttgctccaaataaaataaacgattaatagtacaaagggaagggtgtttccatagtagggggaagacgtcctagattaggggtgtcttacaatggtgaagggacaagtttgtttggtaaagaaacccatgggagccattgattctgagagaggcctgaggtgtgttccactgaaccagtcagtaacttggtcgtggtcattgttgctgaaaagatagtccccattgatttatccttatatgtagtttgcgggattgtggttgtagtcttccaaaagcattaaactttaaacacaccatgagagactcgcaagacattcactggggattacttgtggtaacatggaccagaaacagaacaagagtttcaatgaatctaaatatttcgaattgaagcatttgcctattagacatgtcgtcatcagcaagttgctgtagcttgtcaaatacgttgatgtacatctttgtcaattgatccctgataaatcatattagagccatataatagcagcgccgggaggggtatgccagaatcaacaatgaaacgataatgacgtaataatcatattcacaccaatttttaatttttgctaaaggctacaccaatagttacagaacgcataggactaatggtatttgcgagcagtttatttgaaagtatcatgaaaaaggtggtgttgttgaaaggcctacggtgtattccattgacaaatcaattactcgtttgtggttattgttgccgaaaagataagctctattgatcaactcatctgagttgcttgtttatttttacgttgtttgtgggtgcgtagtctttcaaaagtattaacaagcacgccctgataaactcacaagactgcaatgttgcactataataaaaaggagaagaatttcaagggatctaaacgtttcagattaaagcatttgacaattagacatgtcgtcatcaaggtgatatagctgttgaatagattgatgcaattttcatgtcaattgaccccccccgccccgcccccatatagccttttattagagccataacgtacaggtaccgcgtgccataactcatgcatgaagagacaacgaaaataacgtaactaaaccaattgaaaaaacagaatcgctgaagattacaccagtagtttttgtacactttgcatagggaaaatggtatttaattggaagtatcatgattaaggggtggggttgttgaagaaaatattggaaaattcagatttcagataatacagtaagagagactgttggtaatggtggttgagcatgggtacgggctttgcctgaaacttaaaatgttttcccattcttcccgtgaacgtaacaaacaagttcagaatccagatccaatgattcccgttacattacgattttgcgtcatggcaaggatctcaaatgtattattacatatttaaatagaaattaagattagatcttattattttgtattattaggatgttattgaattactcttatatatataaaaacctcatgtgagagaaaatatatgaaagagagaagggagaaatgaatgaagaattattattctaatatatgcatatctgatttttaacatggtatcagagccatggttccctccatgaatgagagtcatggtatcctccatgaaaaaaaatcatggtttcctccatgaatgagaatcatggtattctccatatttccgatgccttatttgttcagagtctttcttcttcacaatcccaaacgtatatctccttctatctttttatcttatcttcaatgtattccacttatacctaaccatttatctcctccttaaccttcacatttttcgattcctttacaaattatgattattattatcatgaattccatttttgccttgcataacctttgcgattttggttccattttgaatcattcttgtatccatttgaaggtcattgatgtaaagtcaattgcattgttttgaatcattcacagatcaaccctgaagtctattgacatgaacatgtgattgttccgaatcctttctcgtatcttaattctccatgcacgtattctatttgaaggtcattgatgtgaagctcgttgcattgttctgaatccttcacagaccatccctgaagtctattgacatgaacatgttattgttctgaatctcttcccgtatctcaattttctttctacctcacataaccgaagcacattgtggactatcttgaagcacttcttgaacctattgctgatcaaagtcattccttaaagagtgtttgaagaaacaattgacaagttgggcatgaccgatattcatgcaccaacttgaggggagtgttgaattgtattatttaaatttcaagttattattaagatttgttaggttgttacattttttattattatatttaaatagaaattaagattagatcagtttgttattatttcgtattattaggatgttgttgaattgctcttatatatatataagaacctcgtgttaaggaaaaatatatgaaagagtggaggaatgaataaaatgaatgaagaattattaattcaatctatgtatatatatgatttttaaaacaaagttaaaaactaaaaaaagtaaacggaaaaggagattgtgtgtacctcaacatttgccatcttattctacaactcaatctcccttcccttgcttatttattctctacacttccgcgtagggtctcaaatatttgaggtctcagattcccaatctccgttcgccacctgttaaggtaataagcttttcttcttacgcatagattttcactattgtacttgctgcttcatgcacaatcatatcagaaattggacaaaaaaaatactacaagttaagatcattgatgtgataatgaaccgacacagagcgaaaaagtagggttatagaaaattattgaacgagtaatcagtaatatattaattcagtttcataaattccttttcagttagtttagttaagctgttaattgttagcgaggtaatcgaattcaccaccttttcccttccttccttctccttttaccaccagagagagagattgaaaatgcctgcagagaagtcgaacagttgcgatagcgaagtggaagcgttcgtggaggttgatccaacggggaggttcgggcgttacagggatcttcttggttgcggagcagtgaagaaggtatacagagcgtttgatcaggaggaaggaatcgaggtggcgtggaatcaggttcggctgaggaacttcagcgaagacactggtctcatcaatcgccttcactctgaagttgagttgctcagaaccctcagcaacaagtacatcatcgtctgttacagcgtgtggaaggacgaggagcgccacaatatcaatttcatcactgaggtctgcacctccgggaacctcagggattaccgcaagaagcaccgccacgtctccattaaggccttcaagaaatggtccaaacaggtccttaagggattggagtttcttcatacgcatgacccctgcatcattcacagggacctcaattgcagcaacatctttgtcaacggcaacattggccaggttaataattgctttgtttttattaattagtatttctcatgctattgatgattgatgaagaaacgaaaacacagtcatgccaacatatatatgcagttctcttctttttaagcaatgatttggtggttcaaagaaaatgcagttttgttacacgatgaattagcttatgcagttatgcataacctaaaaatcagttgttggagaagctaagagaagagagcttctacaaattacaaatttgcttatgcataagctatgttttgcattgctaggttgcattttgaaaacttaaggtgtatttagttactatttccaaaatttgtttttagttttcgaaaacggaattatacaaggtcactcatatagttgatggagggtgatgcaagacaaaaagaaagtgtagaattgaagaagagtttgaacatagtgaaaaacatctgttaattatttctgctttctggtaatttggaaataattttcaaaatttggatgagaagtcgattactaaataatgtggaattgttttagaaaacagtttataaaaccaaaaaaagtgaatggaaataaatagacccttgatttttgaccttggcattttgtaggtgaaaattggtgatcttggattggctgcaatagtgggacgtaaccatgcagcacattcaatcttagggacaccagagtacatggcacccgaactgtacgaggaagattacactgagatggtggacatatactcttttggaatgtgtttgctggaaatggtaacaatggaaataccctacagtgaatgtgacggtgtggccgagatatacaaaaaggtcacgatgggaatcaagcctgaggccttgagcaaagtcacagatcctgaggtgaaggaattcattgagaagtgcatagcacagccaagggcaagaccttcagccacagatctccttgaggatcctttcttttatgaactcaacaatgatgaagaatcaacgccaatcaattgaataccttcattcacacgtattcagagttcattgtttgacccttatgtccaactactttttacttccaagttccaagtatattcgtatcccacaggccacaactaattgttggtcagtacatgcatttcactccagtttcactatatcagtgatgtacataacttccgcagtggactgaacaatagatgacactgtttggagaaaatgccaatccacttgttttccagctgcttccctcatttatttctggcatattctgttttacttgcttcatcagttaaaccgttaggacttgggagggcttccttaaaattggttgcatcatctcttaagctgaaaccaacaagcttaagattaactatcaaatttagatgcttatctctgcaactacattcttatctgtccacctaaagtgacctttcagaattagcccggcccaatgggttaggccgatgggctttttattttgaggttcagaaacaataaggtcaaattgacccgacccaatagaccaaacaggttagcatactatgttttttaagccccaaaactaaaaactaacatgtgataggatgaataagttttgcttttggtccgcgatattaggatgaataagttataatggatggtcgttctatagatatatataggttgatttaagattataggttaatgacagttttcttaattagcaagtaattcatggtttcattttcagttgaattttgagaagcgtattcatcttgaaaacatgtgagatttaatagaaaatatgacaagaaagaaaaactttcttaaatgcacaatttcatcatattttaataataatattgtttctatcttttatatacttttttaaaattaaactacgccatttaataggtgaaaaaattttctttaaatttacatagcaaactaatcaatcatgtcatattttctaatcatgtctagaatcacaatcatttattttgtcattttggatagaagtatttgttacttatatgtagcccatttttataaaataaaaaaaaaaannnnnnnnnnnnnnnnnnnnnnnnnnnnnnnnnnnnnnnnnnnnnnnnnnnnnnnnnnnnnnnnnnnnnnnnnnnnnnnnnnnnnnnnnnnnnnnnnnnnnnnnnnnnnnnnnnnnnnnnnnnnnnnnnnnnnnnnnnnnnnnnnnnnnnnnnnnnnnnnnnnnnnnnnnnnnnnnnnnnnnnnnnnnnnnnnnnnnnnnnnnnnnnnnnnnnnnnnnnnnnnnnnnnnnnnnnnnnnnnnnnnnnnnnnnnnnnnnnnnnnnnnnnnnnnnnnnnnnnnnnnnnnnnnnnnnnnnnnnnnnnnnnnnnnnnnnnnnnnnnnnnnnnnnnnnnnnnnnnnnnnnnnnnnnnnnnnnnnnnnnnnnnnnnnnnnnnnnnnnnnnnnnnnnnnnnnnnnnnnnnnnnnnnnnnnnnnnnnnnnnnnnnnnnnnnnnnnnnnnnnnnnnnnnnnnnnnnnnnnnnnnnnnnnnnnnnnnnnnnnnnnnnnnnnnnnnnnnnnnnnnnnnnnnnnnnnnnnnnnnnnnnnnnnnnnnnnnnnnnnnnnnnnnnnnnnnnnnnnnnnnnnnnnnnnnnnnnnnnnnnnnnnnnnnnnnnnnnnnnnnnnnnnnnnnnnnnnnnnnnnnnnnnnnnnnnnnnnnnnnnnnnnnnnnnnnnnnnnnnnnnnnnnnnnnnnnnnnnnnnnnnnnnnnnnnnnnnnnnnnnnnnnnnnnnnnnnaatatatcatttttattcgttttctctagctcctgcttgctccttatttatcatttcctgaaatgaataacttctactttactcgttaaatgaatcgagacattatttcctttgaactaagcagcagcaatactacatataaaataggctctacaaatttcaacgagtatttgatgaattaaataataaataaaaagcataaaaatatagaaagaaaagtaaaatcatactttttaataaattatttactgaaattaaaactcataaatttatttagtggatatttgtaatatcctttttcaaaagcaattatacttaagacatgatgaaacattaaatgtagtcatttctcttaacgaggatttaaattttagtttgtcacattgtgaagaatgagttcattccgccaattccaagtcacatatgttggtattaaattagaagttaattaaactcatcatcacttcatttcattaattagttaaaaaatttcagataataatattgagtttttaaaaatattatatgatttttttatcagattatataatataacgtgttagtgatatttcttgtatgaaaatatactgaaataaaaggttttttcttacaaaaacttaaatcaaagtttgtattacattagttatgttctacaatcatattgctatgaattagaaaatatacgaacgctctttctttgtgtattcaacaactaataaatccatcttttcaaatagttgcattttgcttaggtatgtcaataaaaatccaacctatggatatctattcgactccgccatgagttttacgtgaaaaacccattttaattgggacccaggtagagttcggatttcccaaggaaatgggattcggaatgttacttatatttttataattattaatagtgtagttacatatttatatataattctataattatatattatatgtaattgctaattatataattatttcatattttatttttataattattaaaatatagaataattattttaatagttaaataaataacattataattataatactaattataataaaatttaaaattatacatttaattaaaatataatttaacttaaatatgtttatgttatttatttttattaaattatatatatatatatatattgaattgaaatgtaattaataatttaatttataatttatttaaagtatatgaacaaataattttaaaaaaaatgtgagatggattttctataattttttttgaacatgataaaatctagggaagaataggattgaatttcatttttcacctcatcttttataaactcaaaacgaacttgtcccgccttttgagggacaagaatgaaaataagcaaactcgcgtttgattgctgttatccctaattttgctataagtagatgaattgtttgaaattttcattttccaatgaaataagtgagctttaaaaagaaagaaaaaaagtaaaaacaagagaagagaagacatatattagtaacctctacagtattcaaagcatgctttttttcttctttaaatttaaagatccctccattaaaaaaaaaaaaaatttaagagaatttcgtagtgttgacattaagaagcacaaatctgctacaaagatttggcaacagcatcatattcgtattccttggtagtttactagttgcaaatgcaaatgataaagccttccttaggcggcgtgtcaatggttcactgtctaagagatgtatattactatattagaaaagaaaaatatcaaacgtatttttcttttataaaatcagcaaagcagttgtattaatggaaatcgatcgataccagaagtaccaaacttacaaatagagatcattattttatatttatatcaatgaggatataaatattatataaccaatataaaaaaaatataaatattatcaaacgtatatctaaaaaatagagtgtataaacagaaagaagnnnnnnnnnnnnnnnnnnnnnnnnnnnnnnnnnnnnnnnnnnnnnnnnnnnnnnnnnnnnnnnnnnnnnnnnnnnnnnnnnnnnnnnnnnnnnnnnnnnnnnnnnnnnnnnnnnnnnnnnnnnnnnnnnnnnnnnnnnnnnnnnnnnnnnnnnnnnnnnnnnnnnnnnnnnnnnnnnnnnnnnnnnnnnnnnnnnnnnnnnnnnnnnnnnnnnnnnnnnnnnnnnnnnnnnnnnnnnnnnnnnnnnnnnnnnnnnnnnnnnnnnnnnnnnnnnnnnnnnnnnnnnnnnnnnnnnnnnnnnnnnnnnnnnnnnnnnnnnnnnnnnnnnnnnnnnnnnnnnnnnnnnnnnnnnnnnnnnnnnnnnnnnnnnnnnnnnnnnnnnnnnnnnnnnnnnnnnnnnnnnnnnnnnnnnnnnnnnnnnnnnnnnnnnnnnnnnnnnnnnnnnnnnnnnnnnnnnnnnnnnnnnnnnnnnnnnnnnnnnnnnnnnnnnnnnnnnnnnnnnnnnnnnnnnnnnnnnnnnnnnnnnnnnnnnnnnnnnnnnnnnnnnnnnnnnnnnnnnnnnnnnnnnnnnnaaaaaaaaaaaaaaatgcgtgatggtaagtcggtaataaccctattagaaattccacatctgcatatgtattggcaacttcgataaatgattacttgaattctatgaatagaaaactaatacagctgcatcaaattcctgtggattttgtagccagcctcttgatgtaagactcaattataaaagataaaaaaagccattacggtataaaaaacgtacagcataagaatcacacgtgcaaaaacgatatattttttttaatagaaggttacgtgtcgcaaaatccggaagccgaatgtcattaagaaattataataaaatgatgggtagcttctgcaaaaaatatatgtaaaatatttgtgataaattatgttacagttagagtttaattactaaaatgtacgaaaagaaaactttgttagttattatgtttggcaaaaccatcttatgagctaatttaaaattaaaatctagtttaaagctgaaaatttataaataaacttattgaattaaaagtatttgacaaaattaattataaaagtaattaataactaataatataaaaatgtatttatgtaacttttgtttttgtttaatttagagaacacaagattcccattttgtgtatgatcatgagctcatttatttttattctatctctttctcattttctctatctacgggtcactttctagttgcatttatatgcaaggatgagatagtaactaatctaaatcatcattttaacccaactaacaactttctaactaattctagctatatatatccaacaccctcccaagttggtaattgtttattaacatttacagcttgagataaataatacaaaccgaaataacgcagtaagaaggacggaagaaagaagagaggggagaatggtgagttcacctcaaatctgcaaagactttgttaaggagaatggatggttatagggttcaaagactttgttaaggagaggtataatagttatttgtcttcatatgataggttccaacacttgatgatcaaatctagtgttggtctgattgcaagcttttcggaagaggaagtcaaggcagcgatttgggactgtgaggggagcaaaagcctgggtcctgacggatttattttcaaattcgttaggcacttctgggatactcttaactcggacattatgagggtcatgccagaattctgtagatatggtcgcttttcagttggtgctaatgcgtcatttcttgcgctcatccccaaaaaggagactccacaaggtgtgggggattacagaccaatctctttgattgtctgcttctataaagtggtggtgaaggatatataaacattcaacaaagttcttttgtgtaagtggtttggtcctggtccctatatggaatgggaaatcccaatggaagaagaactgctgcagctattacaaatttggaaaccgaaaaggactggtgtagatcactgggtgtggagagtattaccctcggagggatattcgataaaggaagcatatacactaattcaaaacttgatgattgatgaccactcaaagtttttttaatgctttgtggaaggtaaaagcaccatcaaaggtgcttgtgtttaggtggcgtgtgacactagacaaaattcaatccaaggaagctttgttgagaaggaatataggtgtggccgaggaaggattgttatgtaaactgtgtaatgctgagactgaatctgcatttcatttgttttttcttactccttctcatacaaggtgtggcaaaggtgttatggctggcttggcctacaacaagctctccctacaatctgtgttgattacctttggagtcaccatgggctttgtagagagaatatggaccatttgtgctggatgggaatttggatgcctcttctatggtccatctggactcataggaatcatgtaatttttagagaggcagaaccgtgtatacaacaggtgctaagaagccacgagcatccttttccttttttgaatggatttctaaccccttgctttgtctgaattcgatatcataattgttggtgctcattgtttccctgtcggtggagtcttgtgatgtatagaaactttcccttctatgtatttatttatttatttattttgtatctcgtacttatgtatctctttcgtgacttgcaataataaataatagtttaataaaattcacatttgtcttaaaaaaacaatgtaggaattgagaagatgttgaactcatatataagcaaacacacaagtgaacaatataatgacaactaaggaaagctcaactactaagtagaagtcacaatcattgtttaaccacataacaaatacaaaccaatatatttaaccaaacaagtggaagataagtacattattaacccacttgacagaaacaatcaacatcttcaatcactgagagagagatattaaccattctaagtagaagtcgtatcgtatgtttaatcattgaacatgtatctgaaaaatgagaatgcacacatatatgcaaacgatcaagaatcatgaagaaaggctacaatggactttacaaattttagaattacatgtttactcaaatattctacaatataaatataaatttaataaaacacaacataaatcatgctattactaaataagataaaatccaaaaaaagaaattcaattttgcaacgcatcatgtacttttcaaagagtggggaaaagtaaaatattggatccaggggtccgtggttgaaaggaagcaaaacccaataatcaaagcaccccaatttgagtagccgtgccgtcttgggcgttaggcatacggcacataaaggaaccacaaaacttcacatgcacttcaccatcttcttttcctttgcaatattttaatcctatcatttcctcaattgcctatttatttcatttcatacccttgcatttcttttttcccaatacacccaaattgttcttttatgaaaacctaaaccaaatccaacgtaacttgtgtaaactgtttggtcccatcatttccccaaatgcctcatcagccatcaattaaggccctatacgttgacaaagacaaccgagactgaaagtttcagccgttggatacgttatactaaaagactgaaattattacaatgacaatagttaagcaaataaacaaaaaaaagttaaaaatacaaaacacatatttttaaataattaaaaatatttaataaaatattaactaattttttagtataggttattgggtatcctatgttagtttaataatacaattgtagaactaagggggtctaattctcttaattaaataagatatgtaagtgttataaatctcctatactttatttgattttcaatgataaaaaaaatatcattataagtgttaatattttctctttaaataatattaatatagttacatataaaactaaaattcgaaataatttatcaaactgaaattgtttcataccaattgattcatccactaagtattaactaattaatttgatggctggttaacataatactcatgaattttaggagtagggttttatggttgtacatacacaaacttaaagtgcaagattgagatgttaggatgcatgaaaagtcaccctattctattggccgaggccgccaagttgtagcccaagaattcaagtacccaacattcgagaacgtttttgaagccttaaaatttggagttcgagtttcactcgtgtgcatgttgactttgactactgcaaggtgactaatagtacaaatccagcaagaatatgttggggacaaactcctcaaatctcacttcaccacactatttttctttctttaacatcagaaccctgctgctctagttccttaccagataaggattcagaatcatatgtattcgtttagtcacagttagaataagtagcatccattgtcagaagtagcactaacatggaggttgtgagtccaaaagattattctgttgcttctagtccttactcttcacctaacattggagccttgctcaagatcaaggtcatcacatggtaatatatacatgtcattgatcattcattccatttccacgtgtggttatatgtctgaagtttatctcatgcacttcgatattttgtcacaggagccaacaaacaggtttacctgtttctgtccgtgttcgagttaaagacaagatattcaacctgcataaagtaagtttagacacaattggaatccaagaatgtttcacatagcttacagtaactaccttaattatttatttgcatgttgtgtttattgcagtttcctttgacttcaaagagtggatacttcaagaagaggttaaacaatgcatttgaggttgagcttccggaaacattccctggaggaccagaaacctttgagatgattgccatgttcgtttatggatcctccaccttgattgacccttttaacgttgtggcccttaggtgtgcagcagagtttcttgaaatgactgaagatcactgttcgggcaacctttgtgaacggtttgatctttatctgaatcaagttgtgttgcaaagttgggatgacacccttattgcacttcaaaggtgccagatgctacttccttggtctgaagatctgttaatagtgagtcgctgcattgaatctcttgccttcatggcatgcatggaggtgcttgatccagaaagaaggagagacactcctgttgtgacagtggaagagttggcttccaaagattggagctgtgaaataatgaaggatgatgctgtgagccaagacctgtggatgagggatctgattgctctaccctttggctttttcaaaagggttatagggtctttgaggaaacaaggaatgaaggagaagtatgtgagtcccatcattgttttctatgcaaacaaatgggtgctctctaaaaagacgcgccaattttgggagagttcctgtgacaagattggggagggtggcatgaatagcaaagcttctgtgattctacaaggtgttgttgatcttcttccagtgggtgataaggctaggaaagtgattccagtggggttttatttttccttgctttctagatctcttgagttggggttgaggactgaaagcaaggcaaagttacaagaccaaattacatcacttttgcacttttctcaagtggaggattttcttcttccagaaagtggagcagagttaatgtcctctagcatggagttggtgactatggaaagcataatttcagcatatgtagcatctagctcacgtgtaaaccataccccagaagctagcaattacagggttgcagagttgtgggatgcatatttattcactatagctgcagatccagatatgggaccaaagagattcatggaactcattgaaagggtaccaccatcttatagacagaatcattaccccctttacaaaacaatcaacagctttctcaaggtaagcaagcattcagcattcctcaaaagcttcttaaaaagtaggactcatcaattaaactacattagtttattacacatgctctcatgccaataatactatctgtttaggaactgaacactataatgaatgttcagcattctacctagtggtctaactgaataattaactagaatgatacaataatcatggtccttagaataagagaaataatgagtaaatactatttacaagcttagcaaaagttgatcatagctcatttcccaacttatgtcaaagaccaatcattaaaaaagaacaatacaatttcagctttaacatatttcgctttttatttatttatttatttattgtagacacattcaggtatttcccaagatgataagggagcagtgtgcaagtatctggactgtcaaaggttatcacaagaggcatgcattgaagctgttcaagacgaattgatgcctctacgtctaattgtccaagcactttttgttcaacaactcaatacacacaaagccttcaaagaatactcagattcatttagatatgcacattgtggagacatgtcaggaagcctatcaagctctaggtatccaaattctgcaagtcagaatctaggaaagagcccatacactgatggacctgagctcagtagcaggccattgagcttcctgctgcagaaagacaatgtgatgcagaatttcaagttctcaactacggaatatgagtcaacaagcttcagaatccaaaatcttgaacaagaactcatgtccttgaaaagaagccttcaattgcacaacattgttacaaaagcagaaccaaatttgatcaaaagccagaagatgaaaccgtgtggcttagaaactcgatcactgagcaaaaggagcaacccaattggacaagcgactagttgcatcagttctgtaaactttgcttcacaaagaaggtatgcaaacaggctactcaaggtctttcgccgcataactttgtctggaagtcggaaactgaagagaaaaccgggaactcctagtcaattgtccaagtaattgtagcataagaactttactattgatgtgtatgaatatggatacaaatagaaccacgtagagttggagactcaattctctttttccttttatcacattttattgaaaataataagtaaacaggaaaagagggagtgagagaaagaaagaaagaaagaaaagaaacaaaagaaagaaaatgttaatgggcatttaataggctaatatacttcattaacattcataaaatatatgtccattaaaattatataacggataaggttgtagatatcgaacgttgaagagctgacaaaaaagattggggttcagatggcttcaacttgtcatatttgagtacaaaacattattggtttaacttgacatgataggatcatgaagaaactctcctattatatatatatatatatatatatatatatatatatatatatatataaaagaagattgacataactaggccatgtgaaattccacaaaacttgcagctccattgcatgatttgcatcttggacaatggcatagtgatggtggctgacattgacaggcatgcagacatcaacccactaatcagttttgtctgtctttctgtcttcctcaaagtaaagaaggcacatttgtaacataattcactactggctatcaactttgctacagtatcaacaattggtgtgatgtgaagcactgaaccaaaagcttctcctgaatggtttaatcacccaccagtaagatgagcatttgtttactaagattcacagtgacttatctgcacagttcataaacaaagctaaattagcatatctgaatagaaaacactagtagttagagtacaatgggtaaacattatagaaccataaatatcacttcattatgaaacggtgcattaattactgcattatagccaaaaagttaaaaacaccaaacttcattcatagtgtactttcagtaactcccatatttggcccaaccaatttattaatcccttttgagattttttttattatataatattacccttaagtcggacctccttacccttaattatattagtcaatgctatctctctaacatgtcagtcgatggcaagggtaaccaatgatggacttgtaacttttggaagaatagttcctttctattgttccaccttgcaagcttcataattgaaccgaaaacacaggcatcaaacaaataaaggctatattctacgcattttttttaatgctgaatactttttgtgagttttctcgctttaaggtaatctcaatttctttttttgtttattagatattcttatattcttggtgtacgagacagattccttgtgatttacaggttaagtcctccttacaaatattataatctcaattggtggccaccgtttattttgatcactgcaacttattatcttttgaatctataggcgaaaaaaaaaatccttatgacatgtgaactgtgattagcatatatgaaatgaatatcatcttttcactctacaaaaatatcatccttttgtattacaagaaagtcaactagacaattgcaggggaacgttcgcactgcctttattgtccctttttttcttctttctcgaagctaaaatatacattgtttatgttttagattatattcagttggatcaattgtgtttcataatttcatggaagttaatttaacgagacaaattttaagtctccaattagttaaaaaaaaaattaaatcatgtcctaaagtaaataaaaaatcattatttaaaaaaaaatcgtttaaactcattttaaaaacgtaaatgattacattaaactttttaaaaaataaataactaaattaaatattatagaaaacgtaaagaactaagagtatattatttagccttttctaaatgacaacagatttggcaatgcaaattaaagcaaggaaatttaatgcatatatcttgtatctttgctagattttatcattgccatattgttttcacaagataactgaaaaacggctcaggtgagaatattataattatttttttgactgaatgttataattatnnnnnnnnnnnnnnnnnnnnnnnnnnnnnnnnnnnnnnnnnnnnnnnnnnnnnnnnnnnnnnnnnnnnnnnnnnnnnnnnnnnnnnnnnnnnnnnnnnnnnnnnnnnnnnnnnnnnnnnnnnnnnnnnnnnnnnnnnnnnnnnnnnnnnnnnnnnnnnnnnnnnnnnnnnnnnnnnnnnnnnnnnnnnnnnnnnnnnnnnnnnnnnnnnnnnnnnnnnnnnnnnnnnnnnnnnnnnnnnnnnnnnnnnnnnnnnnnnnnnnnnnnnnnnnnnnnnnnnnnnnnnnnnnnnnnnnnnnnnnnnnnnnnnnnnnnnnnnnnnnnnnnnnnnnnnnnnnnnnnnnnnnnnnnnnnnnnnnnnnnnnnnnnnnnnnnnnnnnnnnnnnnnnnnnnnnnnnnnnnnnnnnnnnnnnnnnnnnnnnnnnnnnnnnnnnnnnnnnnnnnnnnnnnnnnnnnnnnnnnnnnnnnnnnnnnnnnnnnnnnnnnnnnnnnnnnnnnnnnnnnnnnnnnnnnnnnnnnnnnnnnnnnnnnnnnnnnnnnnnnnnnnnnnnnnnnnnnnnnnnnnnnnnnnnnnnnnnnnnnnnnnnnaaaactacatccttgggaaagctactcccactaaatcagctaacaataacgtggtgatttctgatggaggaaaatcagaaatcgtgagacgatcttgagatagagctcccatttttgccaataattttataataattactttaataaatttatttagagtaattttaattgactaacaatattttttttacatgatagtgtataaaaaataatactaaaagtcaatattaaagttttttttattcgtaaaaatggaacaagcctcaaccaagatccattggtaatattaaaatgtgaatactaattatggaaatgaatttttaattttaattaagaattaatactaaaaacacttgagaaaagtgtacatgtgttttccttcatcctccacgtgacacaggatcgtgctccgacccatctctgttcaataattaaatttaccaccgccatatcgatatctaccatttctgctgcatcgttatatatgtccatcccatcatctaccttcttcgagtttaaggttaccaacaacatttcactataattttttttttttttttgcactattctcaaattatcaaactccactgttaattcgtttgatccttcaccccgttgtcgtagtcttttccaacatgcatgctgagcttgacgtatatatatgtaatttggataagactcttctcgttttaacattttttaaaatgattaagagtgtgtttatatttaaatttaattaatgtattatgcatttttctaaaaacatattaaatttaaataattaatacatatttaattattcattttacggaaaggagacgaaaaatgaatggatgaaaaaagcaaaataaaaaaaaatcatgttattgcatgataaaagcagaagatgaaaaggcattatttcataaatatgcatgtttcttgtagtgaacagaaaatttttaaatagcttgatcaaaacttgcttagcaagtacttcctcaaaaagaatacttctatagatgtaatatttatatcgctaaatgaaacacgatgacatgtcacttaatgagcacaagatgataaataatgtgtctcttaacaagacactttgacataattctcacatggacttgccttggatgttgtatggtagttgaaagctctctcatgacttcttcattcatcttcttcattttttactcttttttggctctacatgtgtctaagaggagctaaacttatccttgttggggttggatataactaagttgactcttatgtactatttataacttaatttgattttgcacttcaatattagttcttattccatgcttaaagctttgtatgatttgatcatttatattttgatgtttaatttgattcgtattggaaaacactctttaaaccttgaactaaagttgaacacctaatgaaccttattgctaggaacaaggcatggtttattagtcatcttaagatccttaatctcaaagcaagtaccttaattaattaagtcatctaaagtattaatgttttacaaggacagttaggctcttttatagaaggaatacaggtttgagtgtacttatgaactgattcatggattgatgttaatttttgaagtgtaaaattgattaaatgtttaggagttgcaggagaaggaagaaattaatctaacaataaacattttctccatatttgatatgtacattttgtacactttatctattagataaaaattcaaaaaaatcttaatatttattatttatagtcttgtttgattatgtttacaacatttaaaatttccttcattccaaattaggggtaagcaacagttggtcacgattgggttcgggcagaaaatgcttaaaatgttgaaattcaaccacatcaaatgttgaaccgcaaccaaccgtttggaacttcgaaatttgttggattcaagtaacacggttgaaggattacgcgggtgggttatgtcagtttcaagagaagaggtcacgcgaagggaaagggaatgccgagaggagacctatggttgttggtgtacactagaaagagaaacttcatggtggttggtggatgtgcgagatggtttttccacagcaccttgcttaaaaatggtaagacttcacgaaaaaaggacatgaaaaccttcattgaaatttccaaaaaaaaaggagaaataaagaactatgaacaaagaaaaagaaagaaagagttgagaagaagaaaggaaggtggagagaaagaactttgataaaaaaagttacttgatatatttgaatgaataaaaaaattaagcttaaaaaacatgattcaatattttgccggtaccaatagaatattttttattgtgattgattgtcaatgcaaataatgaaagaaagaagaagaaaaatgattaattggagaaaataaaaatgaaaaaaaaatcatnnnnnnnnnnnnnnnnnnnnnnnnnnnnnnnnnnnnnnnnnnnnnnnnnnnnnnnnnnnnnnnnnnnnnnnnnnnnnnnnnnnnnnnnnnnnnnnnnnnnnnnnnnnnnnnnnnnnnnnnnnnnnnnnnnnnnnnnnnnnnnnnnnnnnnnnnnnnnnnnnnnnnnnnnnnnnnnnnnnnnnnnnnnnnnnnnnnnnnnnnnnnnnnnnnnnnnnnnnnnnnnnnnnnnnnnnnnnnnnnnnnnnnnnnnnnnnnnnnnnnnnnnnnnnnnnnnnnnnnnnnnnnnnnnnnnnnnnnnnnnnnnnnnnnnnnnnnnnnnnnnnnnnnnnnnnnnnnnnnnnnnnnnnnnnnnnnnnnnnnnnnnnnnnnnnnnnnnnnnnnnnnnnnnnnnnnnnnnnnnnnnnnnnnnnnnnnnnnnnnnnnnnnnnnnnnnnnnnnnnnnnnnnnnnnnnnnnnnnnnnnnnnnnnnnnnnnnnnnnnnnnnnnnnnnnnnnnnnnnnnnnnnnnnnnnnnnnnnnnnnnnnnnnnnnnnnnnnnnnnnnnnnnnnnnnnnnnnnnnnnnnnnnnnnnnnnnnnnnnnnnnnnnnnnnnnnnnnnnnnnnnnnnnnnnnnnnnnnnnnnnnnnnnnnnnnnnnnnnnnnnnnnnnnnnnnnnnnnnnnnnnnnnnnnnnnnnnnnnnnnnnnnnnnnnnnnnnnnnnnnnnnnnnnnnnnnnnnnnnnnnnnnnnnnnnnnnnnnnnnnnnnnnnnnnnnnnnnnnnnnnnnnnnnnnnnnnnnnnnnnnnnnnnnnnnnnnnnnnnnnnnnnnnnnnnnnnnnnnnnnnnnnnnnnnnnnnnnnnnnnnnnnnnnnnnnnnnnnnnnnnnnnnnnnnnnnnnnnnnnnnnnnnnnnnnnnnnnnnnnnnnnnnnnnnnnnnnnnnnnnnnnnnnnnnnnnnnnnnnnnnnnnnnnnnnnnnnnnnnnnnnnnnnnnnnnnnnnnnnnnnnnnnnnnnnnnnnnnnnnnnnnnnnnnnnnnnnnnnnnnnnnnnnnnnnnnnnnnnnnnnnnnnnnnnnnnnnnnnnnnnnnnnnnnnnnnnnnnnnnnnnnnnnnnnnnnnnnnnnnnnnnnnnnnnnnnnnnnnnnnnnnnnnnnnnnnnnnnnnnnnnnnnnnnnnnnnnnnnnnnnnnnnnnnnnnnnnnnnnnnnnnnnnnnnnnnnnnnnnnnnnnnnnnnnnnnnnnnnnnnnnnnnnnnnnnnnnnnnnnnnnnnnnnnnnnnnnnnnnnnnnnnnnnnnnnnnnnnnnnnnnnnnnnnnnnnnnnnnnnnnnnnnnnnnnnnnnnnnnnnnnnnnnnnnnnnnnnnnnnnnnnnnnnnnnnnnnnnnnnnnnnnnnnnnnnnnnnnnnnnnnnnnnnnnnnnnnnnnnnnnnnnnnnnnnnnnnnnnnnnnnnnnnnnnnnnnnnnnnnnnnnnnnnnnnnnnnnnnnnnnnnnnnnnnnnnnnnnnnnnnnnnnnnnnnnnnnnnnnnnnnnnnnnnnnnnnnnnnnnnnnnnnnnnnnnnnnnnnnnnnnnnnnnnnnnnnnnnnnnnnnnnnnnnnnnnnnnnnnnnnnnnnnnnnnnnnnnnnnnnnnnnnnnnnnnnnnnnnnnnnnnnnnnnnnnnnnnnnnnnnnnnnnnnnnnnnnnnnnnnnnnnnnnnnnnnnnnnnnnnnnnnnnnnnnnnnnnnnnnnnnnnnnnnnnnnnnnnnnnnnnnnnnnnnnnnnnnnnnnnnnnnnnnnnnnnnnnnnnnnnnnnnnnnnnnnnnnnnnnnnnnnnnnnnnnnnnnnnnnnnnnnnnnnnnnnnnnnnnnnnnnnnnnnnnnnnnnnnnnnnnnnnnnnnnnnnnnnnnnnnnnnnnnnnnnnnnnnnnnnnnnnnnnnnnnnnnnnnnnnnnnnnnnnnnnnnnnnnnnnnnnnnnnnnnnnnnnnnnnnnnnnnnnnnnnnnnnnnnnnnnnnnnnnnnnnnnnnnnnnnnnnnnnnnnnnnnnnnnnnnnnnnnnnnnnnnnnnnnnnnnnnnnnnnnnnnnnnnnnnnnnnnnnnnnnnnnnnnnnnnnnnnnnnnnnnnnnnnnnnnnnnnnnnnnnnnnnnnnnnnnnnnnnnnnnnnnnnnnnnnnnnnnnnnnnnnnnnnnnnnnnnnnnnnnnnnnnnnnnnnnnnnnnnnnnnnnnnnnnnnnnnnnnnnnnnnnnnnnnnnnnnnnnnnnnnnnnnnnnnnnnnnnnnnnnnnnnnnnnnnnnnnnnnnnnnnnnnnnnnnnnnnnnnnnnnnnnnnnnnnnnnnnnnnnnnnnnnnnnnnnnnnnnnnnnnnnnnnnnnnnnnnnnnnnnnnnnnnnnnnnnnnnnnnnnnnnnnnnnnnnnnnnnnnnnnnnnnnnnnnnnnnnnnnnnnnnnnnnnnnnnnnnnnnnnnnnnnnnnnnnnnnnnnnnnnnnnnnnnnnnnnnnnnnnnnnnnnnnnnnnnnnnnnnnnnnnnnnnnnnnnnnnnnnnnnnnnnnnnnnnnnnnnnnnnnnnnnnnnnnnnnnnnnnnnnnnnnnnnnnnnnnnnnnnnnnnnnnnnnnnnnnnnnnnnnnnnnnnnnnnnnnnnnnnnnnnnnnnnnnnnnnnnnnnnnnnnnnnnnnnnnnnnnnnnnnnnnnnnnnnnnnnnnnnnnnnnnnnnnnnnnnnnnnnnnnnnnnnnnnnnnnnnnnnnnnnnnnnnnnnnnnnnnnnnnnnnnnnnnnnnnnnnnnnnnnnntttacaggactttttttaatatcaaaatagacttttaatatcccatttcagtacattgttatataaattaaaactgaattgttttaaactatatttaatatttaaaaatacttactgatatatacagatttaaataataagtgcaattaagtaaattcaaaaagcaatcagacaaaagaacaacgatctcataaattatgtttttggtaatgatctcagaaattatttgaacacgatttttatttaaatctagcatgtaaaaataagaagcaaagaaactagattcccatttttattcttcactaatttgaaatcaaactggtaaaaataattaataatagggaaagaaaaaaagaaaaaaagaaaaaagggaagaaagaaaatcatcatcttccatttgcagaggcactatataatggtcataccacatctcgtagcttctctctcgtctcggctttctccttataaacttcttccgatgtgtttctctctttctctctccgtacttttgctttcttgataaaattttgcaatcggtttgacaactgaatttgcatttggtaatcaaattaataattgaaaaaaagaagaagaaaaagggtggggaggcatagccagatattgaacctgccctctgttcttaatctcattgtgcctcccctcagatctcgtcttcaatcggtgggtttcgacggaatcttgattgaagttttgatctttgttcaattgggtctgcctttggatctttgattattgaaacttatttgtgggttttctccaggagtgctttgccttctttgattcactgcttgatgattcttgatgaaagatccgttgtttcctaactgattccgacaatatctatttttgcatcgttaatacagtctctcagtttgtcttaatttatggtattgcttgtaatttttttttttttttggtcatgctagggactatctgtatttcaacaatttgataaatgataatgctatcatgtttttgattttattctacccggatttgtgcgcatttcatcccacaccaggatttttttttttaatcttgttttatgtgagtcattaaaaaaaatgaaataaaattatgctatatcctatagatatatgtaaggaaatggattggatccgtcaggaacacgcctttttcttataccctatggttaggtgctttagaaggttggctttgtccatttctaatgatgctgctgccacttgcatttctaagtttttgagctcaaatgctaattggatgaggcgtgtcttttgcttgtagataaaatgcaatcagataatggcaagttatttatcggtgggatatcatgggacacaaatgaagagcgactcagggagtatttcagtacttatggggaagttgtggaagcagtgataatgaaggatcggacaacaggtagagctaggggatttggtttcgttgttttttctgacccagctattgcagaaatagtcataaaagagaagcacaacattgacggaaggatggtaattcttctttgtttccccccttttaagtctaaagcttgcattttgacattaaggttctctttttgaattatgcaacattggaaggtagcagttttgatgttgaaatgtactccggtttgcaaaattttgttatattcacaatctcaaaatatcttagctagattttaaaatggagcaggagtacattaaatttttccacatattttatattctctaatcttttgatttttgttattgttctcttttctaagcatctgtcataaggattgacagatcttgaaaacttttttattttctgatatacagtaaatactcaatactgtttcctctcttgctaggttgaggctaagaaagctgttcctagggatgatcagaacatactgagtagaaacagtggcagcatccatggttctcctggtccaggtcgcactagaaagatatttgttggaggtttagcatcaacggtgacagagagtgatttcaagaagtactttgatcagtttgggactataacagatgttgtagttatgtatgatcacaacactcagaggccgagaggttttggatttatcacttatgattctgaggaggcagttgacaaggtcttacttaaaacatttcatgaattgaatggtaaaatggttgaggtcaagcgagcagttcctaaggagttatcgccaggaccaagccgcaccccactcggtggatataactatggtcttactagggtcaatagtttcttaaatggcttcactcaggggtatactccaagtacagttggaggctatggacttcgagtggatgatagattcagtcctgttgccggtggtcgaagtggatttgctccatttggatcaggttatggaatgagcatgaattttgaacctggtatgaatgctggatttggagggaatgcaaatttcaatagcaatcttagctatgatcggggagtaaatccttattttattggcagctccaataggtttggcagtcctgttggatatgagagtggaagtggaggaaacaattctttcttcagttctgtgactcgaaatttgtggggtaatggtggccttagttatggaacaagttctgcaaactccaatgcatacattggatcagggagtgggagtgttggagggaatgcatttggcaatgctggagtcaactggagttcttcagcaatttctgggcagcagggaggagggaacaatatgtcacaaagtagtggcaacctgggatatggaggtggtgacaacaattatggtttggggactggagggtatggaagaagcactggtgccacttttgcaccaacatcttcatactctgcatcaaatggcggtgttgatggggcttttgcagacttttacaataatagttcagtttatggggaccccacttggagatcttcaaattctgagagagatggatctagtccctttggttatggacttggtggcacagcttcagatgtttctgccaagagttctcctggttatgttggtggttacactgttaataagaggcagccaaataggggtaagagttacaataatttagacaaatacccttttctagatactaggcattttgaggaaatgttatctgattaatgttttatcctctttgttaagtttgctattataatggaacaattgtaattggttctttatactatattcaacccattacttaaatttaaatagttaggtgaagttgtggatgcatatttttgaaagcttgtttctcagaacagtgttcagtgacattcaatcacggacattattgctctgtggttattcaatagaaggggtgacattgactaaatgagtaattatctatgtttgagttcattatacttttgccccattccttgttttccgaactccattcccttaattattgtatctgtgtgccttattttgttgtataagtaagcttcttggaacactagcgcatctttagataaccataatgtcattcagatgccagaattcaaactacatttatatgggtttttttttctaatcttgtgtggaatatatttcaaggatgtgaaaattgagaggtcccataggtatcaaaaagtaagcttcaaattgaaagatagctattactgaaacaagcaaagttaaccttcatagaaatatgtatatggttgtcattgttccacaacctaactttgttttagcatggcttggcttagagggggaaggggttcagattatagatggactttctacaatacctaacagtagaaaaaaaagtccctagtttgagggacgaggaaagtaagcaaggtgcacagtgttgatttatagttttattaaacaacaacaaagccttatcccactacatgagatcggcaacatggatcacataccaccatttggcacggttaaaaaccaaagcattaggaataatatttagcctgagatcctcttttacaacttcctccagtgtcccttttggtcttcctctttcccttttcacgagactaaatcatgcaatatactcctaattgtcgccttgtgtggccccttttgtacattccaaaccaccttaaccaattttttgtcatcttttcctcattcggtgccacaccaaagttttcttgtatatagtcattccgtattttgccctttcttgtatgactgctcattaatctttacattttcatttttgctactccacttttctctcatgttgtccctttaaagcccaaaattcactgccatacagtataactggacgtataattgtgtaatgaaacttgtctttgagtttggtaggtacttagcttttgtgatcacaaataactctcaatgcctttctccatttaagccatcccacttgtatgacgtcctcatattttttccatcattttgtatgattgaacccaaatatttaaacttagaaacctgtgatatgacttattcaatttttaattccgagtcatattactcttgtctcttgctaaaattgcaatgcgtatactttgtcttactcctactcaagcaaaaccctttgtttccaaagtctgcctccaaagtccaagcttaatgttaattgtttcccttgattcctcaatcaagattatatcatccgcaaaatgcatgcaattaggataattttttgtatgcccttgataagcatccaagactagattaaacaaggactcaagccttaagacttaagccttgatgtaatcctgtcttgatagtccttagtttcaccacttggagttctcacagtagtagttaccacttcatacatgtcttgtatagcatgaattataagccttttccaagtcaataaaaaccatatgtaagtctctttatttctgtacctttccgtcaacctctgtaaaagagaaatagcaccattgtgacataaaatcaaattgattctctacaatccttgtttcttctcttaatctattctcaatcaccttttcttctaatttcatagtgactcataatttcacaatgttgatttatattttatagaaaagaataagnnnnnnnnnnnnnnnnnnnnnnnnnnnnnnnnnnnnnnnnnnnnnnnnnnnnnnnnnnnnnnnnnnnnnnnnnnnnnnnnnnnnnnnnnnnnnnnnnnnnnnnnnnnnnnnnnnnnnnnnnnnnnnnnnnnnnnnnnnnnnnnnnnnnnnnnnnnnnnnnnnnnnnnnnnnnnnnnnnnnnnnnnnnnnnnnnnnnnnnnnnnnnnnnnnnnnnnnnnnnnnnnnnnnnnnnnnnnnnnnnnnnnnnnnnnnnnnnnnnnnnnnnnnnnnnnnnnnnnnnnnnnnnnnnnnnnnnnnnnnnnnnnnnnnnnnnnnnnnnnnnnnnnnnnnnnnnnnnnnnnnnnnnnnnnnnnnnnnnnnnnnnnnnnnnnnnnnnnnnnnnnnnnnnnnnnnnnnnnnnnnnnnnnnnnnnnnnnnnnnnnnnnnnnnnnnnnnnnnnnnnnnnnnnnnnnnnnnnnnnnnnnnnnnnnnnnnnnnnnnnnnnnnnnnnnnnnnnnnnnnnnnnnnnnnnnnnnnnnnnnnnnnnnnnnnnnnnnnnnnnnnnnnnnnnnnnnnnnnnnnnnnnnnnnnnnnnnnnnnnnnnnnnnnnnnnnnnnnnnnnnnnnnnnnnnnnnnnnnnnnnnnnnnnnnnnnnnnnnnnnnnnnnnnnnnnnnnnnnnnnnnnnnnnnnnnnnnnnnnnnnnnnnnnnnnnnnnnnnnnnnnnnnnnnnnnnnnnnnnnnnnnnnnnnnnnnnnnatgttgcccataattccattgaagtgttagaaatgatcattttcatatatatagatatatattccgggctcttttcaacagtattgccttcttttttcgagtgtctttcacaaaacttgaaatcaggggaagaaaactgacttctggatagcaatcatagatgtcatgtaaacatcatactagaactagttcttcactgtccttttccttctgagttgtctgatagattttagatgttttgctgcatgtgtttagagtgtgcaatcatgatttgcatgcaatcaaatcttcatagaagagttgaatgttttttttgtctgttattcccctggtgctctacccctcccacttagagggcaatataagaagttttaccctcttgatgtttaatagttagtcaagagggctgatataaccccaagttctttgtaatagagtagaatctgttctacatcattttcttctttatgatatgttatactatgttcaaattttttccaacaatgaatctcaatttctttagtctagtaagttatggctttatgatatggatttatctttgatcttttgtcttttagcaaaacttgactacaattcacttatactctttctgccgtatgttcctttgtagtgctccattttttcacatcaacatataaattggatgaaaataaatattgatgctttatacttgtgaagtgtcctttcaatttttcactttcagttgtcttttatgccaacactgataaacttgtatatttacttcaggaatcgctacataggaagatcgttttgatgacacgaacttgtaggtgaagataatccagtgaagcaggtgaattgtgaattttgcacaccactgttgttactgaatttcggtttaagacacaagatgtttggttttctagagctaactggagtgcctgttttgagggttcagatctagagatagattacaagggaatgttaaggcttgagtttttgagttactctttaggatatgggatttgagtgagatgtaaaatctgattgcgggatatagcggaagtgtatcatgcatcacttgtgaggcagcaatagaaaaaagatggacagacagcatttcttttttcctttttctttttgggtagatttttttgccttttatgtcttgcaaagttgtgggttcttctcaggaattgtttgtttcttcatccgtcattttggtttgcttttagcagattgtatctgaggtttttctagtgtgaaacattgaagggatacccatctagggtcccgtgaataagtaaccacatgttctgattctttttctaaaggggaatattttatgctacaaattcaaactatatgtgataaatggatttatttttccccatttgaatattttccaaattttgtgaactatttagtattttattacacttgcttttatagatattttaatactatagttgagtttaccccattgccattcttaacacagctaaatcgtttaagatacatttgtagaactttgtaagcgtcattaataaagcaatgcacccaataaaaaatatcaaaaaattaaatatagattaattcttttagaaatacgagactagannnnnnnnnnnnnnnnnnnnnnnnnnnnnnnnnnnnnnnnnnnnnnnnnnnnnnnnnnnnnnnnnnnnnnnnnnnnnnnnnnnnnnnnnnnnnnnnnnnnnnnnnnnnnnnnnnnnnnnnnnnnnnnnnnnnnnnnnnnnnnnnnnnnnnnnnnnnnnnnnnnnnnnnnnnnnnnnnnnnnnnnnnnnnnnnnnnnnnnnnnnnnnnnnnnnnnnnnnnnnnnnnnnnnnnnnnnnnnnnnnnnnnnnnnnnnnnnnnnnnnnnnnnnnnnnnnnnnnnnnnnnnnnnnnnnnnnnnnnnnnnnnnnnnnnnnnnnnnnnnnnnnnnnnnnnnnnnnnnnnnnnnnnnnnnnnnnnnnnnnnnnnnnnnnnnnnnnnnnnnnnnnnnnnnnnnnnnnnnnnnnnnnnnnnnnnnnnnnnnnnnnnnnnnnnnnnnnnnnnnnnnnnnnnnnnnnnnnnnnnnnnnnnnnnnnnnnnnnnnnnnnnnnnnnnnnnnnnnnnnnnnnnnnnnnnnnnnnnnnnnnnnnnnnnnnnnnnnnnnnnnnnnnnnnnnnnnnnnnnnnnnnnnnnnnnnnnnnnnnnnnnnnnnnnnnnnnnnnnnnnnnnnnnnnnnnnnnnnnnnnnnnnnnnnnnnnnnnnnnnnnnnnnnnnnnnnnnnnnnnnnnnnnnnnnnnnnnnnnnnnnnnnnnnnnnnnnnnnnnnnnnnnnnnnnnnnnnnnnnnnnnnnnnnnnnnnnnnnnnnnnnnnnnnnnnnnnnnnnnnnnnnnnnnnnnnnnnnnnnnnnnnnnnnnnnnnnnnnnnnnnnnnnnnnnnnnnnnnnnnnnnnnnnnnnnnnnnnnnnnnnnnnnnnnnnnnnnnnnnnnnnnnnnnnnnnnnnnnnnnnnnnnnnnnnnnnnnnnnnnnnnnnnnnnnnnnnnnnnnnnnnnnnnnnnnnnnnnnnnnnnnnnnnnnnnnnnnnnnnnnnnnnnnnnnnnnnnnnnnnnnnnnnnnnnnnnnnnnnnnnnnnnnnnnnnnnnnnnnnnnnnnnnnnnnnnnnnnnnnnnnnnnnnnnnnnnnnnnnnnnnnnnnnnnnnnnnnnnnnnnnnnnnnnnnnnnnnnnnnnnnnnnnnnnnnnnnnnnnnnnnnnnnnnnnnnnnnnnnnnnnnnnnnnnnnnnnnnnnnnnnnnnnnnnnnnnnnnnnnnnnnnnnnnnnnnnnnnnnnnnnnnnnnnnnnnnnnnnnnnnnnnnnnnnnnnnnnnnnnnnnnnnnnnnnnnnnnnnnnnnnnnnnnnnnnnnnnnnnnnnnnnnnnnnnnnnnnnnnnnnnnnnnnnnnnnnnnnnnnnnnnnnnnnnnnnnnnnnnnnnnnnnnnnnnnnnnnnnnnnnnnnnnnnnnnnnnnnnnnnnnnnnnnnnnnnnnnnnnnnnnnnnnnnnnnnnnnnnnnnnnnnnnnnnnnnnnnnnnnnnnnnnnnnnnnnnnnnnnnnnnnnnnnnnnnnnnnnnnnnnnnnnnnnnnnnnnnnnnnnnnnnnnnnnnnnnnnnnnnnnnnnnnnnnnnnnnnnnnnnnnnnnnnnnnnnnnnnnnnnnnnnnnnnnnnnnnnnnnnnnnnnnnnnnnnnnnnnnnnnnnnnnnnnnnnnnnnnnnnnnnnnnnnnnnnnnnnnnnnnnnnnnnnnnnnnnnnnnnnnnnnnnnnnnnnnnnnnnnnnnnnnnnnnnnnnnnnnnnnnnnnnnnnnnnnnnnnnnnnnnnnnnnnnnnnnnnnnnnnnnnnnnnnnnnnnnnnnnnnnnnnnnnnnnnnnnnnnnnnnnnnnnnnnnnnnnnnnnnnnnnnnnnnnnnnnnnnnnnnnnnnnnnnnnnnnnnnnnnnnnnnnnnnnnnnnnnnnnnnnnnnnnnnnnnnnnnnnnnnnnnnnnnnnnnnnnnnnnnnnnnnnnnnnnnnnnnnnnnnnnnnnnnnnnnnnnnnnnnnnnnnnnnnnnnnnnnnnnnnnnnnnnnnnnnnnnnnnnnnnnnnnnnnnnnnnnnnnnnnnnnnnnnnnnnnnnnnnnnnnnnnnnnnnnnnnnnnnnnnnnnnnnnnnnnnnnnnnnnnnnnnnnnnnnnnnnnnnnnnnnnnnnnnnnnnnnnnnnnnnnnnnnnnnnnnnnnnnnnnnnnnnnnnnnnnnnnnnnnnnnnnnnnnnnnnnnnnnnnnnnnnnnnnnnnnnnnnnnnnnnnnnnnnnnnnnnnnnnnnnnnnnnnnnnnnnnnnnnnnnnnnnnnnnnnnnnnnnnnnnnnnnnnnnnnnnnnnnnnnnnnnnnnnnnnnnnnnnnnnnnnnnnnnnnnnnnnnnnnnnnnnnnnnnnnnnnnnnnnnnnnnnnnnnnnnnnnnnnnnnnnnnnnnnnnnnnnnnnnnnnnnnnnnnnnnnnnnnnnnnnnnnnnnnnnnnnnnnnnnnnnnnnnnnnnnnnnnnnnnnnnnnnnnnnnnnnnnnnnnnnnnnnnnnnnnnnnnnnnnnnnnnnnnnnnnnnnnnnnnnnnnnnnnnnnnnnnnnnnnnnnnnnnnnnnnnnnnnnnnnnnnnnnnnnnnnnnnnnnnnnnnnnnnnnnnnnnnnnnnnnnnnnnnnnnnnnnnnnnnnnnnnnnnnnnnnnnnnnnnnnnnnnnnnnnnnnnnnnnnnnnnnnnnnnnnnnnnnnnnnnnnnnnnnnnnnnnnnnnnnnnnnnnnnnnnnnnnnnnnnnnnnnnnnnnnnnnnnnnnnnnnnnnnnnnnnnnnnnnnnnnnnnnnnnnnnnnnnnnnnnnnnnnnnnnnnnnnnnnnnnnnnnnnnnnnnnnnnnnnnnnnnnnnnnnnnnnnnnnnnnnnnnnnnnnnnnnnnnnnnnnnnnnnnnnnnnnnnnnnnnnnnnnnnnnnnnnnnnnnnnnnnnnnnnnnnnnnnnnnnnnnnnnnnnnnnnnnnnnnnnnnnnnnnnnnnnnnnnnnnnnnnnnnnnnnnnnnnnnnnnnnnnnnnnnnnnnnnnnnnnnnnnnnnnnnnnnnnnnnnnnnnnnnnnnnnnnnnnnnnnnnnnnnnnnnnnnnnnnnnnnnnnnnnnnnnnnnnnnnnnnnnnnnnnnnnnnnnnnnnnnnnnnnnnnnnnnnnnnnnnnnnnnnnnnnnnnnnnnnnnnnnnnnnnnnnnnnnnnnnnnnnnnnnnnnnnnnnnnnnnnnnnnnnnnnnnnnnnnnnnnnnnnnnnnnnnnnnnnnnnnnnnnnnnnnnnnnnnnnnnnnnnnnnnnnnnnnnnnnnnnnnnnnnnnnnnnnnnnnnnnnnnnnnnnnnnnnnnnnnnnnnnnnnnnnnnnnnnnnnnnnnnnnnnnnnnnnnnnnnnnnnnnnnnnnnnnnnnnnnnnnnnnnnnnnnnnnnnnnnnnnnnnnnnnnnnnnnnnnnnnnnnnnnnnnnnnnnnnnnnnnnnnnnnnnnnnnnnnnnnnnnnnnnnnnnnnnnnnnnnnnnnnnnnnnnnnnnnnnnnnnnnnnnnnnnnnnnnnnnnnnnnnnnnnnnnnnnnnnnnnnnnnnnnnnnnnnnnnnnnnnnnnnnnnnnnnnnnnnnnnnnnnnnnnnnnnnnnnnnnnnnnnnnnnnnnnnnnnnnnnnnnnnnnnnnnnnnnnnnnnnnnnnnnnnnnnnnnnnnnnnnnnnnnnnnnnnnnnnnnnnnnnnnnnnnnnnnnnnnnnnnnnnnnnnnnnnnnnnnnnnnnnnnnnnnnnnnnnnnnnnnnnnnnnnnnnnnnnnnnnnnnnnnnnnnnnnnnnnnnnnnnnnnnnnnnnnnnnnnnnnnnnnnnnnnnnnnnnnnnnnnnnnnnnnnnnnnnnnnnnnnnnnnnnnnnnnnnnnnnnnnnnnnnnnnnnnnnnnnnnnnnnnnnnnnnnnnnnnnnnnnnnnnnnnnnnnnnnnnnnnnnnnnnnnnnnnnnnnnnnnnnnnnnnnnnnnnnnnnnnnnnnnnnnnnnnnnnnnnnnnnnnnnnnnnnnnnnnnnnnnnnnnnnnnnnnnnnnnnnnnnnnnnnnnnnnnnnnnnnnnnnnnnnnnnnnnnnnnnnnnnnnnnnnnnnnnnnnnnnnnnnnnnnnnnnnnnnnnnnnnnnnnnnnnnnnnnnnnnnnnnnnnnnnnnnnnnnnnnnnnnnnnnnnnnnnnnnnnnnnnnnnnnnnnnnnnnnnnnnnnnnnnnnnnnnnnnnnnnnnnnnnnnnnnnnnnnnnnnnnnnnnnnnnnnnnnnnnnnnnnnnnnnnnnnnnnnnnnnnnnnnnnnnnnnnnnnnnnnnnnnnnnnnnnnnnnnnnnnnnnnnnnnnnnnnnnnnnnnnnnnnnnnnnnnnnnnnnnnnnnnnnnnnnnnnnnnnnnnnnnnnnnnnnnnnnnnnnnnnnnnnnnnnnnnnnnnnnnnnnnnnnnnnnnnnnnnnnnnnnnnnnnnnnnnnnnnnnnnnnnnnnnnnnnnnnnnnnnnnnnnnnnnnnnnnnnnnnnnntgtttgtttgtatttattggcttattgcaattttagaaaattgcttgtttttctttcaaaatatttgaaaaaggtattcaatttttgttttctaaaatctgtttctgcttgcctttctttcctttttaaagatattttgaacattttaactaactcaatatatttttactaaataaaaattgtctttcgagttccagttgtgtataggaaagaaaatctttagagttatttttatcatcatataaatgtttttgagtcaaaaaatatcatatcctatagaagatattttttagtttagataaagagacagacaaatcaaaagcaaaaaactttgggagattctttttnnnnnnnnnnnnnnnnnnnnnnnnnnnnnnnnnnnnnnnnnnnnnnnnnnnnnnnnnnnnnnnnnnnnnnnnnnnnnnnnnnnnnnnnnnnnnnnnnnnnnnnnnnnnnnnnnnnnnnnnnnnnnnnnnnnnnnnnnnnnnnnnnnnnnnnnnnnnnnnnnnnnnnnnnnnnnnnnnnnnnnnnnnnnnnnnnnnnnnnnnnnnnnnnnnnnnnnnnnnnnnnnnnnnnnnnnnnnnnnnnnnnnnnnnnnnnnnnnnnnnnnnnnnnnnnnnnnnnnnnnnnnnnnnnnnnnnnnnnnnnnnnnnnnnnnnnnnnnnnnnnnnnnnnnnnnnnnnnnnnnnnnnnnnnnnnnnnnnnnnnnnnnnnnnnnnnnnnnnnnnnnnnnnnnnnnnnnnnnnnnnnnnnnnnnnnnnnnnnnnccatctatgttattatgttttaatattatcattaaataatataatttataattaaatattcataaataacattaggtgtcgaaaaaaaataaaaaaacaaaagtctatccatgcaaatttttgacggaattttccgtcgctaatatcccatatgtgtatttttgacggatttttccgtcggataaaaaaatccgtgagttaaaattttctatgaccattttattgatggatttttgtccgtcgaaatttcatcagaaattttattttttcaacggattttctaaattaacgacggattttgtctgtcgaaaaatgggattgttttagtagtgagtgaaaaccttctatattattaatttttcttccctcctcgattgagcctgtttctatttttgtatttgtttaatacaatttctatgttttatgccgtttacacatcctttcatttgccctatttctacattgggtcatttgactgatttctttatagctcggctagcagggaaattaaaaaaaaaaagagccatgcaattggatagtgggaagcaacgaatatcaaataacatacaagttacaacgggaaggaatagacatggtctcgtctttcttctgactttctattcttctttttgtgtggtgcttggctagttggacattaattaatctatcatacttcttacgtgttttagatttttaaaaaataaaaatataagcgttaaccctaagtgatttttttgaacttaaataaaagaattcatgatttaaaataacttattttaattttgaaatggtttagatattatgaagtaaaattactcttaaagcaattattagttgattgaaaaattgttaatgaatattaatcgaagctaattaaaaaatactcaaagttttattttagaagtggtatgaaaaaatcttaaacaacattcattttgagacaaaggaagtgtatttcaaaacctttataattgcacaacttggcattggataaaaaatgaattaaaagacaaattaaggaacaatgaaatgaaatactagagtaataatgaggaatgttaattgtggatggcacttccactggctttgtcggaagttccaatgagtccctctctcctcatcttgtcttccttggatttcctacagaagacaacccaagagttgacctccaaagcaatgcaaaggccaatgagagtggagagccctaagcagtaagtcaacttggcataagatctgctggctcccataacttcaaatccctgaaacacattcacaaagccaagcaccacacacgagtaacctacaaaatggtggtatgacttccagtacttcctgaacttgttcctggtctttggcctaaataacaaggccagagtctgcagagcccccaaacaaaacacggagattccaagcttccggtggagcctatactccacccccggcgacagttgccccagccggattccgatcacaaaccccactgttcccagaacgaaaccaaacagttgtattcctgcatgcataatatttattttcagtccaaattcttattatcatcaaattaagcaattactactataacacaagtcattgtcaaacaagtattaaatgactgcccgaagagttttatttttattttttaaatcattaatttaatgatatatggatatgtttagaatatatatatatatatatatatatataacacttaattatttatatttatatttttttatcaaatcatatcacataacatattgcatacgctcttctattttctgtttttatatatcacttataatcattatattagaggattaaggtagtctaattctcatagaaaaataacactaaataaataatattttgtgaacactcattgagagagtatgcagtgacgagtccaaaaaaataattaagatgggacattaatggtagatccaagaaaatttatttatgtccgcaaacttaattttgtaaagaaaatttaaaggaataaaaaaattataaaccataatctaaaggaataaataaataatcagaccaaagtattgttctggattgaatagaacaatgaaaaaaattattgtaacttgcgataagatttcaaaagatgatgatgacaacataagagttagtttagatataagtattgagtttgagatctttgaaatgagttgttacaattagactaaaatatttctacaaaatgcatatggttaaactgtacttctcattttaatgaaaagcaaaaactttaataatcttataaacaagtgcgaatgcatataataagcactgaaaataattatcaaatattgcaaataagtgttaaaggtatattaatattctaatagaaaaatttaagggggcactaccccaactcataagttagatccggccatgggtgcatgtgatacgtactcaattgagaaagtaacacaagaaaaataattcataaacaaatggattgaagtgtttgtcgaatatttcagaattttataatggaataaaaatcttaattatggtagttaatatatatatatatatatatataaggaaatgtggggatgctaaatgagtatttataaggttaagttggagtgtccaaaaatcagaattaaaatcaaatacagaactggcgcaatgttgttctttttatttgtaatccttcaaataaagaatagtgatatgtgaatattttgtcaccctaaacattttattaacatttatattttttatatcatatcatattatatatatatatatatatatatatatatatatatatatattaattagctttttactgtctagtcaaactaaaaatatgaatggttgaaattaaagagtaatatggagaatagtgttgatgatcacacctgcatgagcatagaaccatgcagggccgagcgcttgaatgtgcctaaggtagcgtgcggtgatggctcccattggtaacaaaatgccccacgagatggcgttaacggtgccatggatcactctcaacgtcgtgagatccgtgtgctgtggagcagacgaacccgacaacacgtcaaaggtagcaatggaagccagatcggtggaagtagttggatgaatggtgggcgagtacccctgaacgtaaagtcccctgttccaaacaaggtgaatcttggtcttgttcgttttcagtttgactgtgccgaagatttggatggcggcgccgttgtgcacggtggccattttgcctccgtacatggcggcggtggaggagaggaggtggatgtcaagggggcgagagagcagtggagatttttgaagcttcactgtggggtcaagaatataagatagaagcactatttggcctgagtttgggtccgggaaagctattaaggcacgtgttccggtcatttcgggcgatgtgggattaatgccccatccaacccaccctgaaggtgatatgaagcttccaaagaagactagttctaaggttgagttgtgggggtggaatgtccatgctatggaggcttgttgggttgggaggttcatgcatttttcgaacgttttcgtggcggtttccacggtgcaatgggatgacaatgcaatgtggggaagggaacacacaagggagaggtaaagaagaattagcatggtggtgccgtggatcagtgatggatagactgggagagaattaatggttcatggttcaatgcttgcttttgttaacaacaatgttgtgttttctcatgatgtgttcagggtgagtgccatgggtttttttattattaaaaaagtttatgtgagttgcatgggtcccaacttcatcataattaggatagaaattaaaattcaaagaatttttacatttacttacaaattgtctccaaataaaattttcgtatcgtcaataaaaatcatactcatgtttttattatttcttaccaaccaatttttgctagctgtcattatggattttgagctcgtaataagtgagaatcgttagtgctttctttctttgacgtgcgaaatagtatgtagtttgatgcttgactttgaaggaaagacaaggtggtgtatgtgcgtttggtagaaatgggacaatgtgatcgggttttaaaatttgtatctagcggtgggagtagagggcaatatagtatatcaaacgagatattattatgtcgatcgagtgcggctactccttttgattatagtcattgtcttcacgagatacgaaggttgatgtttgcatattgtgcttggctttgaagctatgccataatcattctacttctgaaattttacccatccattttgtttttaagcaaatgaaatgagtgttttactcgtcctttaattatgtccataatttgaatcccaaacttcgagaaaaaaattgtaaggttaaacacataatttagtttctatatatattacatattttcgtcttctacgtgtaaatgctattgatttggtttatgtcatcgtcgtcataacaccatctttaattgtcttgtgttagttaaaatccttacgcattcttaatttgaccccatatatagtgtatttttaatctaatcctgtaatttctcctatagcgcattcggtattcttaatttctttaatgatgtcgatctatagtacagagactaaaaattaagaatgcgttatatgtataaggatcaaattaaaaatgatatttatatattagaatcaaattaagaatgcataaaccattacagatattatcaggacaacaaaggactaaactgatagcgtttgtatgtattatgaccgatttaataagttgataggtaagggactaaattgagaatacgttgtaaaggggctagctaaattatatgtctaactaaaatgtaatgtaaatatagctaaaactttttggctatatataaagagacagtatgtgtgtgttttttaatcgttaggcatgaaaacccattgattaattatagacaacaaaacaatatttttaaaaacaagtttttaaataagaataaaattgagattaccgttcctagaatattatacagtaaaagggttatcaagtatatataacatttcatagtttaaaaaagtaaaaatagtctgttggtaaatatttgagggctatttaagacgtcttgctcttagccccaagacttaatttcatgttaatgaatttgctagtaagagcaaaatagtggtacccagaactatattaacagatgatgatatgacaaaattttagacaaaataaaaatatgttattgatgatactttctcttacattaatttcttttacaacttctctttctctttctttttctctttcttttttcatcacatatttcattttctcttagaaaatgtggtaattaaaaaaaagcatcatgtatcctttataccttttgctccattgtccattatagaatataccaaacgtagatatgtctgcaatatatactagagatatatcttgggcctttcttgcaatgcaagtaaaattaagaacaaaaaaaaaataatgagaattaggcttagattttcatgaatttcaatgcacttggtttaatgctaaaaagaatactattaggttgtcggtatggtgtgccgtggtatggtctttgtggagccatagaaacaaaatcttctttcagcaatttcagctggattttgatactgtgatggaggaggtcatttataaatcatggacatggcttgaggcaaaacatggtgagttcttctcctcaaggtaccaatgacaataaaaatgttctagcttgcatttagtgcctttaatcaatagtttaggttgcaaatagtcatatggagtacgttcataaagtgataatacttgtctaattagatacagcattgactcttctataaagggattggttctgctatagaggtcgatcatattctgttctctttagtttgtattggagattgcaatcagatgggtaccactggtaccttcagtattaatgaaaatactttttactgaccaaaaaaagatatagtatcataattagcatactttaatagttgccatttcaaaatttggtagctgaatatagtaaaaaaaaacttcttcatgttctccgattccaaaacatgcctaaattaaaaaaaaaaaaaaacataaattaagataggcagaatttggaagaggaacaaggaaagtaaaatttcaaagtcagccatgcatgcatatatcttgattaattaattaagaaattaattaacagatatttggaatacgctttgtttaatataatatatttatctttatatatatatatatatatatatataaagatattatattaaacaagaatatgattaaagataatattgaattgaattattattattattattatctccttaactcgagaaacacaataaattcattatcccgaaaaaaaagtaaaaaatttagaatttaaaattaaagacaattgaatataacttctcatataaaggaatatatatagtttagtgacaacatatgtataagagaacctagattcaatcccctcaaataatacactcttggaaatgaccgatgacttggcacgcaccatttgtgcactcagaaaagctctctccccctcccaacaagtcttctgctatccgttgatatgccttcttctttgacaaggtaagttgacgtgcatgggttttgccgagtacatgcatgacatgacgtgtcgcgtttttaatttcagcttatgactatagagcaatctaggaagtggttcaaggacgtgcttcctgcattggcagaattgctagctctggaggttgccctatctctttgttggaagcacactaccatgatgctcttcgcatattggaatcgcaccaaccaggctttgtgtgtcttagccaggttacttactttcttattattacattttatctacttttttcctccaagatggtttcaaaaccaaaatgaaaattctgaagtcgtaagtattgcacaactgtaattgcttttcaggagttggttgctgctcttcttgtttgctcattattttgtctattcccagacgatcacaaccatgtgaaaggccttcaaatgatcaactttgatcaattgtttgcgtaaggaatcctttgctcattttttgtcgtaaatttgatccttttagtgtcagcatgctgcaacatagagatgaaattgatattggtcattggtgtagtccatttttttttctcttgcaatattccaaggtttttcttaattttcaggagtgtgtatatatatgatcatatgaatgaaaaactgcaagataaggttttgtgcatccttcactattttcaaaggataagttctgatatgcctaagggcattgtttcctttgagcgaagagtatttcccttcaaaaattactctaatattggtgatcccgaggcggagctttggggcgcttctcgtacacctctatgcaatgttttggtaaatgaaggaaatttattttcaattgtcagcaagactaatttctttcagtttttttaatgattcatttggtttttaatagttaatactttggcattgtcatagcttctcaattcaggccacatggaaaatcaatcaagtgtagccgttgaagtatattttgcaagtaaaaagcttgggggagatgtccttggcatggggacttcacagttacaatatgttttttgtttccatccattatacctaggtatttatgatagcttttatacaatagttcctgatataagcatatgcatgcagtcttgtgtacattttgtaattttgtaagttgagatatttgtcacgtgaacatttgtttttagcctattgatgttcaataaatttgcttgtaaatgtctgatataggaggaaatccgcttcatgctcagtccagaattgattgctgctgggatgcttttttgccagccgtgacggataatgaggctatagaaattgttggtgtggaaaggttcttgacttatacaagtgtataaatataacagaagataaagttaaacaaataaataattcaaataataagttaatcaaaattcgttaacgttgtatcttctattcacagtgaagtatatttgattcttcccattgagagtgacatgtcgaaaagaaaaaaagaacacgatcgacttcacgtagcaaaatgtgacttggagaaattgaaagatgattaaaaatccggactgtaagtattcaacatggaacttcacaattgtccaaagatgtgcatggacgatccttgcgttcaagagttattatctcaccaattacttgttgtttatctgcttgaaaatgatcgtccgctgaaaagttaaggaaggatagagttaactcatgcgaccaattaaaaaattagaaattttataccctagaagtgaagcaacaactttatacctttgtcgctattaaagttgtccaaaaattgcaaaagcttatgtttgtttgtaacaaggatgctgacaatctcaggaggcttattttgatttgcaacaaatagctgtcaattaaaataattaaatttaaactaagaacactgagtttagaagaatctattaaaaaatatatacttgctccatttcaatatacaccttgaaaacgtggaaggtgtccaattgaattgtcttatttgaatcctgcaaatttggnnnnnnnnnnnnnnnnnnnnnnnnnnnnnnnnnnnnnnnnnnnnnnnnnnnnnnnnnnnnnnnnnnnnnnnnnnnnnnnnnnnnnnnnnnnnnnnnnnnnnnnnnnnnnnnnnnnnnnnnnnnnnnnnnnnnnnnnnnnnnnnnnnnnnnnnnnnnnnnnnnnnnnnnnnnnnnnnnnnnnnnnnnnnnnnnnnnnnnnnnnnnnnnnnnnnnnnnnnnnnnnnnnnnnnnnnnnnnnnnnnnnnnnnnnnnnnnnnnnnnnnnnnnnnnnnnnnnnnnnnnnnnnnnnnnnnnnnnnnnnnnnnnnnnnnnnnnnnnnnnnnnnnnnnnnnnnnnnnnnnnnnnnnnnnnnnnnnnnnnnnnnnnnnnnnnnnnnnnnnnnnnnnnnnnnnnnnnnnnnnnnnnnnnnnnnnnnnnnnnnnnnnnnnnnnnnnnnnnnnnnnnnnnnnnnnnnnnnnnnnnnnnnnnnnnnnnnnnnnnnnnnnnnnnnnnnnnnnnnnnnnnnnnnnnnnnnnnnnnnnnnnnnnnnnnnnnnnnnnnnnnnnnnnnnnnnnnnnnnnnnnnnnnnnnnnnnnnnnnnnnnnnnnnnnnnnnnnnnnnnnnnnnnnnnnnnnnnnnnnnnnnnnnnnnnnnnnnnnnnnnnnnnnnnnnnnnnnnnnnnnnnnnnnnnnnnnnnnnnnnnnnnnnnnnnnnnnnnnnnnnnnnnnnnnnnnnnnnnnnnatttgagtataggataatgcatatatactcttaagagattcatgaggatcctcatattatcgaacgagctcacatactggaccattaattacatagcattcgagcgatccaataacatatcccccaataactgtaacatattaatttgattacaatggtgaaatggatagcaagcagttaaaatggacaattgatgttgaaatgaatttgagacttaaggaatctaccacagattaaattatttataccttgatagcgtaccgtctagtaaaataactggtggattcaagcaactgagagttgtactctttgaagaactgacaggcacagtaaaacgttttagctgataatatattaaaatattgataaaaacaaaaaacttaaaaagctatattgtatgaaaacaaccaaattacttatgttagaataaatttgaggattgtgaaagaagctatgacttcttttattcaaataattgactccaatgtgaataagtttttggttcatatctgcctcattgtgcatgttgacctcaattatatataaggtgcgaaaccttacattccaccgaggaagccaccaactaaagacaactgatgaaatctttgtaaaccaaattaaattgtctaatttaaacttttacaaaaagataaaacaatgataggggaaaattctttccctcttctacagccttgattgcttttacattctcgaatttacagaggataaatacatgtaccttttgcatgacataattatatactaagtagactttggcgtacttacccagtcataatttttagaaagaaattcagcaactgtagatttgtgccttgtcaataactcctgtgtacatcagttttacatgtcaaagcctatttatacaaaataattatcataaaacacattcccaaatacaaagagttcttcgcatacatacattcaaatcaatataattaagcctggatagtttaaagatattatttgtttggatgtcgcataaaacaaaggaaaattaaataagaagatgcaagataaaagtatattatggatgacagtttctcttacatttcttttacaacttctatttctttctttttgtatatttctttcatcacatatttcattttctctcggaaaatgcgaaaaaaaaagcagtatcctttatgccttttgctccattgtccaatatagaataagaacataactaacgtagatatgtatgcgatatactagagatatattttgggactttttcgcaatgcaagtaaaatgaagaacatgtaaataatgagaattaggcttagatttgtgaatggaaattaaaagacatagcatcataattagcatactttaaaagttgcaacagcatctgatgctctttcaaaatttggtagctgaatataatccgaaaacttcttcatgtgctctgattccaaaatatgcctaaaaaacataaattaagctagtcagaatttaaaaaagaggaaaaagaaagtaaaattccaaagtcagccatgcaagatgcttggctacatttttttaatctccgaaagttaacaattaagaattatgatcctcacacaagcattcatgttggatatataactcaataaattgcatgattatattaattaagaggtcgatgattggaatcgcgtaccttgctacgctctggtggcgcatgcactcccttgcaaccgcaccatacgtcaaagcaatgtcaccctctttctcataactaattaaatcaacttttattaaccatttatccagcacagtactgaaactatgaaataaaatttgaaaattcaatatggaatatcccataaatattcatacccgtctatgagcatgtccacaagatctagatttttttccaggtactgagaagcaattagttgcgaatatattgaattaactcgctgcctttgcaagtttgcaatcacgtgggttgcatcttggcgtgcctaccaacatatatatatatatatatatgaattaattcttaaatatgctagacagagaaattaaaaaaacataatgtaactgacggtgaaatataaaaatgactaccccgagtttaagatttgatagatagagaatgaaaatgcgaaatgtgtcatctttgaaaaactctcgtgtgatctgagaacacgcatcagcatttggctctgattctccgtttccataaagaaccgttcttatctccagtacgttttgcttaggtctgatagctgcaacgcatgcattttatatatatatatatatatatatatacacatacatatatatatatatatatatatatatatatgatttaatcaaggttttaaaatatagtaacgcatggcataaaaaaaaatagtaatgcaaccatgattttgattgcaacgtcaacatttaatttaattttttaatgtctacaactacgtacaaggcaatcataattgtaatcacatcaaccatatttatttatttgtgttttttcacgatattaaaaaagtgacgaaactgatgtaattttaaaaggtatcaaatatcagttttttcaaaagttgtacgtgcatgttatgttggtgctgaagcgtgaaaagatttgagtatctggtgtggtgcttgcgaagtatgatatagcggtggcagtcgtatatattagggtattaattctgagcaaagcttctggtgtttttttttttattttcaggctgcataatttgataaataacaggttgtatgtgcctgatgcattttctgttgtgatcatggttataaattgcatgtggtcatggttgcagttagccaaaaaaaattatattgcaagaaaatacaaatgatgcaaccacaattagggtcatgatgatgagatagcagaaataccttgatgttgcggctgcaattgcgattgcggaccgctgtttaaaaccttttatattgcaagaaaatacgaatgatgcaaccataattagggtcatgatgcgatagcagaaataccttgacgttgcagctgcaattgcgattgcggactactatttaaaaccttgtgcttgacgggggtatgtctagaatttcttgtgtcctcagtttgataatttggaacacatcttgtgtgtcaaatttttttattgcaataaaatttgccttttcaaaaaaaaaaaaaaatcttagatttaattataaatgcacaggcaggtaagacaagttacgtaattttaattatgtgatggaaggaagacattaatttaccttctcttcgcgttcactttcacgagtgcatgttttgcagtcgagaaagatgatgagttctcgggcgtggcgcacaagctccacgagtgttttgtgtaaacataaatatataatttctgtttaaaacaaacacatcaaatctcatgaagatctttagaattcatgagtttcacataaacatgattttgtccatgattactgaatatcttttatggtagaatgttttctcatagttttaaccctttcagttcttgtatcttcttttgatagggataggatacaactttcatggacagacaaatgagtttattcagttttttaaattcctatttattagaaactgaaccaatacgtttaagataattgcacctatcaacaattattcttttaataacttccctttgtaaccaattaccttatgccctttattcattaaatcaaataacatttatttaaatgagccacaatgataaatcttacattcttccacttgctcatgtcacaactttcatttcatgatttaatgaaaacaattataatgcacatacatagggctcaagttttcatacactgacctcatcataaatcatgatcagaaataaaaccaataagagtcatggcggttctatgctatcaaatcgacatagttccttccatgtaccaatttattaactcttcttcctaatatgatactttaatgaaagtttacatcataatgtcccacaataatactattatgtcttcattaggcacaaatcttatttttcaaaataatcattcatccatgcatgtatacataaatttgaaaacaagataattttcaaaaacttaaacatcattgaattcagagtgtcaatagtcaataattacaataatgatcaacattcattagctgacataatgcccacactacatacatgactaataaatgtcttgggcggtaatcctttcgtcaagggatcaactaatataaaattagtgctaacatgctctatagacactctacgtttctgaacctcttctttaacgggaaagtatttcaattccatatgcttaacaccttttgaatacttgtcatttttagaaaagaagattgctgcagaattatcacaataaattttcaggggtctatcaatactgtcgaccaattcaagccttgaaataaagttttgcagccatttagcctaaacgatggcttcaaagcatgtcacaaattcagcttccatagtggatgcaacaattaccgactgcttcgcacttttccatgatatagctcctccaactaagaaatacagataaccataagtagattttcttgtatccatacatcctgcaaaatatgagtctgtgtatccaataacttcaaggttactagacctcctataagtaagcatgtgacctttagtgccttgcaaatatctcataactttctttgcatctttccaatgatccatactaagattactctggtatcttcccaacattccaactacaaagctaatatctggtctcgtacaagtttgagcatacattaggctcccaacaagtgatgcatatggaattgcttccatttcctttcattccaattcattcttaggacattgcatgaaactaaacttgtctcctttctgaattggtactggagatgatgaacagttctgcattctgaatctctctaacactttattaatatatgctttttgagacaaacccaataatccttgtgatctatcacaaaatatttttatccaaatcacataggatgtctcacccatatctttcatttcaaagttactaaagagaaacttcttagtctcatttaaaaaactaagataattagttacaatcaagatatcatcaacatacaaaatcagtaatataaacttactcccactgaccttcagatatatacactgatcaacagtgttttctttaaattcaaaggaaacaacggtatcattgaacttaaggtaccattgtcttgaagtttgtttgaatatgtatattgatttcttaagtttgcacaccatgtgctcttttcccttttctatgaacctcattggttgatccatgtacacatcttcctctaaattctcatttagaaaagtggttttcacatccctctggtgtaactctagatcataatgatccaccaatgctataatgatttttagagaatcctttcttgaaattggtgaaaaggtttctttatagtcaatgtcatctttttgagtgaatccatttgcaactagtctagccttgtaccgttctaagttaccatgagagtcatttttggtaacatccaactctcttacatccttctggtaactcaacgaggtctcaaatctcattttgttccatagatttcaactcatctttcatggcatctaaccacttgtcaccatcttcactactcacggcttgtgaaaacgtcactagatcatcttttatgcctaagtcaaattcagactcttgtagatataccacataatcattagaaatagcagatcttctttccctttgagatcttcttaatgctatttgttgtgattcttctacaatgggttcattcagttcattggcaatagtttcatcatgagcaatgggatcattcatttgttgttcttcattattattaattggtttaataacatgaggaacaacaactttaatagagctacaagtcaaaggaacttgtactctcacttcttgaattgccactttacatggtgtttcactcccactaacttcaacatcttcaatcaacctagcatttccagtttctataatccttgtagtatgattaggacaataaaatctatacccttttgacttttctggataaccaatgaaataaccactgatttttcttacatcaaatttcttttcttgtgggttgtagtatctaatttatgtctgacaactccaaacatgtaggtgccttaagctaagtttccttcctatccacaattcaaaaagagtctttggaactgttttattaggaaccctatttaatacatacatgacagtctttagagcataagttcacaatgaaataagtaaagaagaattacttaacatacttctaaccatgtgcaacaaggctctattacgtctttatgatacatcattctgttgtggttatctggcattgtgtattgagtacaaataccacacttttctaggaatttagcaaatggggccggatgttatccgttttcatcataccttccataatactcaccacccctatcagacctgacaattttcacctttatgtctaattgcctttcaacttcattaatgtaaatctctaaagcatttatagcttgagatttatcatgtagcaaatagacataaccataacgggaataatcatcaatgaaggtgataaaatatttctctttattgaaagagttaacatcaaaatgaccgcaaacatcagtgtgtataatttcaataagctaagtgttttttgtggcttctttctttgtgtgttttgtttatttgcctttgatacaattcacacaaacattcagatcagtaaaatctaaatttggaaggatttcattctttaccaatctttcaattctttctttggaaatgtgtctcaaacgtttatgccacaagtaagtagaatattcattaattaaggtacgtttagtacaacattatgatgcagagtcataagcgtttcagcataaagattatcaagacataatttatataatccatcacataaagtaccattgtcaatcaaatgattgtgcttgtacaaactgaaactaccactaccaaatttaaaagactatccagctttatcaagtttagaaatagaaactaaattcctagatatactaggtacataaagagtttcacataagtccaaatgatgtccactatcaaggatcaaatagcaagtcccaacagcttacattgaaactttcactctattacccataaggacaaacttttcatttggccttgcggtttaggtcgtaaggaatccttgcaaaatattagaaacattagttgtacatccagaatcaatccaccaagtattatacggaacttcaacaaggtttgattcataacatacacaagcacaaggcttacctttcttttcaaagcaagccttatgtttcgggcaatccttttggaagtgcccaaccttatcacagacatatgttacaattatgttccttcttgtggatttgagaagagggggcctgattgatttttaatggtcatcttcccttcttttcatgcttcttaccatttttcttttcaccttcttgatgtttgacataattgatgaaatgaattctctggttcttaattttggtttcctcttgaaataacatattgtgtaattcaagcacattccatttgtctttcatggtattatagttcatttggaaaggaccatatttagacggtaatgagttcaatatgaaatgcaccaggaaattttcatccacattcattcccaatgacttcagttttgctgcaaattttgtcatttcaaaaacatgctcatgcatagcaagtgaaccatcaaatttcatggtggttagtgtacttattagtgtcccatcaagagacttgtcaacagtttgggagcactcttccacaagttttatcatttctttagcactttcagtttgtggaagagttgacttaatgttgtttgcaatgctcattcgcatgcacatcaaattcaacatattggatctttcctcattcttaaaatggaccatttcatcctcagtgcttgaattggtaatagcactaggtttctattctctaagagccaaatccaaattcattaccccaaggtaaaattcaatttgttctttccattaagagaagtttagtccattgaaaactgcaatagttgagaaaagcgaatgtgtagcaacaggtactgtaaggtataaaatttgaaaaaatttatgctttgaatcatacatatcacatactaacataattcacagattcatacatcataaaatgcatactaatgttcacttttgagaatccattaatacacaacattcagctataatgatgctaataaattttgtttttcataatttgacaataatacatacactaactagaattacttactatctttggatgtgtaaatagaactagtcgtatatctattatgtcaacattcatgtttatctgttatgacgacaaataatcatcctttgggttgatccttaactgtcccataataataaaattcaactcatccataaaataataattttaatacattcatagcatcataattatggatgattgaaatgaacatacaatttggaattaaatcactcatacaaatttggccactttggtgactaacaaattcaccatactttaatttcaagatataaacacttcatagaatacaaaaatatgttaaaattataagactttaacaacactcaaacacattctaacatcataattaatttttaatgtcaacaaaatatacagtcattcgatcacaacacaacaacgcatataactttatcaaataaaattttaaatatgcattggtacaatttttaatcaaggctagcgataaagtgaccaaccattattgtttacttttcatcaccaacattaatgtgtctttgtcttatagtgataggaaataattttcatttaatatatatatatatatatatatatatatgttgaactgaaaacaccaccaggactttatcgtgatatccattggaacataaggcataccaagcgagaaacaacaactcggtgggacatgtaagacttcttcatattattcgattaatattatttgatcggtaatactcgcaacaagcagaaaattaagatttaaaatctactaaaatactttatcgttgcatcaaccaaaaattagtaatagaaaatcacaaattcttaaacttgaagctctaatatcacatgtaaacataaatctataatttcaatttaaaacaaacacgtcaaatttcatgaacaagatatttagaattcatgagtttcacataaacatacatttgtccatgattacggaagatcttttatggtagaatgttttctcagagtctcgatcccttcagttcttgtatcttcttttgatagggatatgatacaactctcatgggtagacaaatgaatgaactcagttttctaaatccctatttattagaaattaaaccactaccgtttaagataactgcatctatcaacaattatcattttaataacttccctttgtaactaattacccttatgccctttattcattaaatcaaataacatttatttaaatgagccacaatgataaatcttacattttgggctttggcttgaaaagagatttcttcatctctctgaattaattgcaatgttgttagggttttgcatttacataatgtcaaatgagattagggaagggaagacgtccagttgtgtaatttatttttatgtatgtgcgtacaatgtgtgaaacgattatgtattttgggaatgagaaaccaaggtgagttgttcacaagatacagataaataaaatagcaactaacaagggacggtctgtttgagcaaacctgatgcatccctgcattcgctctcaacgtacgtactagctaatttcttcttcttatttttattattaataataggtttagattgaaataataataaaagaccattcttcatcatgttgtgactttattattatttttataaaaaataaatcgtcttattcctctaaattatcaacaaatccattgcagaccaaattcatttacttatttatttagcctagctagtatctaattccctaaattttggcacacaaatagtgcttcaattcttgctgaagcaaatggttatattcaggagatgtcataatcaaaagttctttctgttctggtacttagagattgaggtactaaacttagaataacctctacatcactttttttttgttcaagccttgtatgaaacagaatttgtgtgcatcctgtttttatatgttccctaatatataaattgttttaatatgttccaaggaaaaattaagcaacatgaacacgttaaataacacaaaaagtagctttagtcgaagaaacttaaaaatttacttaatgagcaaataggttcatgataaaaataaaaaaaaataaaaatatctgaaagaagcagagcaaaagggtggtttcttctttacagattttcgtttaaagtagccatagtacaggtcagagagaggtggtgttactcacctgaaaccacatatacttatatcacgcatgctcaaacctgatttcatttaaaccttaatagataaggataagtgattgattgttgataattattcttcatcttcaacaagtttcattattattcggtaataaagtaaccttattttgaagttggcataacatttctcaaatataatttgacctgaacaatttgttttgaaatatattatacactttcaagcatatttataaatattctctttcttttttttgtacataaatatatactcttattctaatataaataatagtgttataaagaatacactatatgcggagacaggaaagcctcgtagcttctagctagtaattgtgaccggcatgagaacttttctttagtaaatagaaagtcagtcttatatatatatgctcttgcacaaggctttcgtattgaatgaatacccttagacattggcaacataagtatatacaaatgcttattcactatagacttcaaataatcctcatcgtcaccttacgacgatgcttatgaatctacaaaagaaaatatgatcaaggagaatgtgtcaacccaagtatcttaagatgtgcaagcaggagcttttccagtaactttgggcttgacattagcacatttagcaactattggagctccattgaatgtaagagcaacattatttagttccacaccctcacatggtacacccttgctacatataagagttactccttccttggtttttgaagtgcccttaatattcttgaaggtaaccttgcttatctttatttttgatggagtctaagccattgcaagcatgcacaaaatagacaaaaacaaggaataagaaacctcacagtagtgcatattcaatcaagactaaaatactagtgatttaaataataacaactccagtatgattataaagagggtaacaaataaagatatttaaatttaagaatcgtgtctgattaaacatataagtacctgttttgagcactgattccaaggacaatactcttggtctatgatcactgggttcatgacatcaaccatggtaatatcttcaaaatgcatatcagtaataggagaagctcctggagaactaggccaagtcttgatcctcacaccattgtctgtttttgtcaaagtgcaattcttgactaaaagttgttctaccggctcttcttttaggtacttgccaagacttccaacactaatgccatgaccaggtccacaattcacattctggacagttacttttctgctgccatctcccaatgagacacagtcatctccggtggcaatgttggtgttaagaattttcacatcagttgatcttccaatgtgaatcccgtcagtgttgatactggtacttggagcactgacgtggaagccatcaaatgtgaagttattgcaccctaaaacgttgacatggaagtttttgctatccttagaagttatgtcccgaaccatagaattattcaggaaattgaaaccaaaattctgtttacaagaaactcagctcattagaatgttttggtagaagtgcatgtgctagcaatttgagattaattgaaatggttatatagttatatagttcatttattaccttggaacgtgtcttgcaattcttgttagttccacaatcattttgtttccaagcaattgcaccttgaccatcaaaaacacctttacctgataaggtaaaaaagttaacatattgtactttgagccattcatcagccccatggagtgcattcgggtcagccggtgcttgaagtgtgccatcaatttgaatttcaatgggagccatgcaaggaccttttaattcaactgcttccatcttgtatgacccacctggaatcacaattttgcttgcacttgttgctgcacatgcctctttccaagcttttgtcaaagccttgaggacaacatacatataaattacaaatcaaacacaatagcaataataataatcagtggagtattcaatcctttttttagggaactcaactactttttacctgtgttatatctgcacctccgccaaatttctttatattaatgtcaacagattgagttgtactagaaatagctagcaataagaataaaacactgatggctggaatattcaacttcatatccatgttgttattgataaactttattttcttgtactctttagcgatgaatgttgttttcaaaatatgatggaactctatttatacttgagtctcgaagcttcaaaaccattaacaatgtgaacaaacttggactatatcaaagtaattaattatgtttgtgcaattgtctggtttgagttagttactattaatggaaattcattagctaacacaaacgtatcattactatatcaatgtaattaattatgttcgtacaattgtctggtttgagcttgttactatttatggcaattcattagctaacactaacatatcattaataaagttctatatcaatgtaattaattatgtccgtgcagttgtctggtttgagcttgttactattaattaatggtaattcattagttaagactaacttataaccaataaacttctaactgtaaaaattccaatacttaaaaaatcctttttcatcattgttaaaattggtcaaggttattaaacttttttaggaaaattcaagatgaaactcaacataagacatgtttagtttgaatataatcattaaacatataagtctaattttgtagcatataatcttaataatattgtaagtgattttatatttatataatttctcactcatatcataaatataatgtaaagaaaaaaaatacgattaaacttttattattatttattcttcaatgttaatatcattatatgctattttatttatcaataataattattttgtagcatatcttgataacaatattgcgagtgatttcacactcatatcacaaatacaaagtaatgaagaagaaaaacatgataaaacatttattattattattattattattattattattattattattaatgaagtaaactagcaagctatatgcattcaatagttgaatgtttttttttgcctgttattcctctggtgctctacccctcccacttagagggcaatgtaagaagtttcaccctcttgatgtttaatagttagtcaagagggttgatataacgccaagttctttgtaatagagtagaatatgttctacatcattttcttctttatgatatgttatactatgttcaatttttttccaacaatgaatctcaatttctttagtcttggtaagttattgaagttctttatgatgtgaatttatctttgatcttttttcttttagcaaaacttgactacaattcacttatactctttctgttgtatgttcctttgtagtgctccattttttcacatcaacatataaattggatggaaataaatattgatgctttatacttgtgaagtgtcctttcagtttttcattttcagttgtcttgtatgccaacactgataaacttgtatatttacttcaggaatcgctacataggaagatcgttttgatgacacgaacttgtaggaaaagataatccagtgaagcaggtgaattgtgaattttgcacaccactgttgttaccgaatttcgatttaagatgcaagatgtttgattttctagacctaactggagtacctgttttgagggttcagatatagagatagattacaagggaatgttaaggcttgagttagttactattaattatgtttgtgcaattttctggtttgagttagttactattaatggaaattcattagctaacactaacatatcattactatatcaaagtaattaattatgtctatgcaattgtctggtttgagttagttactattaatggaaattcattagctaacactaacatatcattactatatcaaatgtaattaattatgtctgtgcagttgtatggtttgagcttgttactatttatggcaattcattagctaacactaactaatgattaataaagttgtatatcaatgtaaatttgtccgagcaattgtttggtttgagctcgttactattaattaatggtaattcattagttaacaacaacttataaccgataaacttctaactgtaaaattccaatacttaaaaatcatttttcatcaatgttaaaagtgagtttgtttaaatttattttaaaaatattttttaatacaataagtattttttttattttctctcatatgtttatctaaattgtttgtaattaaaataaatattttttttttattttgtttaggaatcttatcttcttaaaaaaacatttttttaaaaaaaaaaacacttattgtaaacactactacaaaaaaagccttcaacattgatttttgaggacttttaacaacgatgttgaatcgaccgtcattgaaagtgaacaactttcgacaacggttcaaataccaatgttgacaacacttttttacattggttgttcaaaatcaatgttgtaaaacactttttacataggttacagccacaaccgatgttgaaattaagtgcattttttaagagtaaattacactcatatcccttatgtttattttcaaattgcaccccatgtttttttctcttggccttattatgtctttaggagaatgagcaattccttctaatttaatgacttccaaaaactagcacgaagaagatagaaattagtaaatgtcgaattgcaaaactattagttctattgcataatgagtgacgatttattacctcttcatgctcaattatgtgtgctaggggaaatataacttgaccttcatccctcatcaataaaccgattgagtgcctcgttgaaacccctggcataacataaaatagatgagttgaaaatgccttataaagcagctcaatggttccaccatttgttgtgggtagcacattgaaaacatcaacagcttgacaatcgtgaaaccacaaaggccggtatttaaggatttatacaacctagaaagagtatgtttgaccatgtgactaataaactcaagcctgacaacagaattaaaactattgcaagaatcaaaattttgttggaacttaaaaagtaaagtaatcgtaaaaacagtgactttagttgaagggtaggtgatggaaatgaaggttgttttttgtgatgagaaagaggaagcaaacctatgaacaaaaaattatttacccaatatcttaattagacatagcagatgctggtgttgcacttggatcaacttggcatgcatgagaacttaattagatagatgattgatttcagcttagattggtgagaaaaagcaaaaaataatttgttcagcagcataccgataatgtttttgcattaaatgttagtaactattatacctgcttccaatattaacataaaggttgcaaattattctgtcttttttcttttgagaaattattttggatataaataattgatttcagcttagattggtgagaaaaggcaaaaaaaaaatttgtctagcctatactaatagtgtttttgcattaaatgttagtaactattatacctgcttccaatattaacataaaggctgcaaattattctgtcttcctcatctgagaaattattctggatatagataattgatttcagcttagattggtgagaaaatgctaaaactaatttgtatagataattaggtggaatagtttaactgtataaataattaagaggagagggatgccgaacgaaaaaggcaagaaaccagtaaagagcaagagagggtgcaagatctcttggatacactttgttagctatctcagtttcagtatatcagtatcagcagaagaagaatacagagtgttgactaaaatcattttttaagcatcaatgccaatgaaatccgaacctattccctgatgcaaactacccaaattctcatcactagcaaacacaagcaaaatgtgttaagataccttcaaaaagacattaggatctcaagcaacaaatattctcaattcatgatccaacttactggcaaaaacttcatggagaattcaacaaaaataaagagaagcaaacaatgaaataaaacacacacacacacaacaaccactaaccactaagttgcgtgaattcttgagtattcttcaactctataccaacaaactaaacttgtaaactaccataacataaatgatacttaccactgtaacgacccattaacttgacaataccgataccattcttagtgctttctgcttccacatgagcagagttaatggctcgttgtgcctcttcaacaacaatgtcaaaaccgaatgacttatcagaatcaggtaaaacatgattaaattaggtgattgtttaaaagcaaatcatttttacagtctcagcatagtagcttcaattgtccaattcaagcatgcttactgggacatcactatcactatcaacgaattttgttccaagaaatcagacaaagcccctcagacatgggtccactctcatatttaaaaagttaaagcatctaaaaccgcaccagccaccaacaaatttcttcatcaactaaccttttttcttcttgaaggaaagaaggcaaactagaattgaagcaaatgcaaatagaatcaaacaacttgtctcccaattaaaaaataatagatgattaaaacaaccacattgaataattcaccctagtgtatcactaccatacaaaacataaatagaaagggatagaagtcacaaaactgttacaattatatagtcttatagattttaatcctcacattagtatattaaagaaataccaaaagtaagtatatatatatatatatatatatatatatatatatatatatatatattaagggatatcttcatcatcaaagaccactaccaaaccaatcacgaccttaacgccagacagcgaacccttgagctttagctccgatggcttccactctatcaccgctaaatatatatttccatgaagcctcaacgagtactattcaataattgaatataaaaacacaagtaacgaaggaaagaaggagtaagaataatacaatcatggattcttccttagagaactacgacgatggcgattgatggctgacgaaaggtaaagacaacaaagaaagttcacgccgtagacgtagatgccatcgcagcagcagcatcgaaacgatgtagacaccatcgcagcagtcttcagagatgagggaacggcgagcagtatcgcaagtgagtgtcaagggtttgggaagcgttgttttgggattttggaagtggactgagtggtgagaatgagcgcgaaaataagagattgaaaaagattttgaattttttaatttggaaaaaaatacaatgccactttctataaaaatcaatgtaaataagcatcaaacaacattaaattttataattactgatattcacatcaatttttaaaaaacagatgttaagaaatttaatttatttacaaatattatcacacttttttaacatcaatattaaaatgactacattaaaaatatattttctaatagtaaaagttattttttttaaagtttatacaaattcattcaaagcattatcccttatcacttttattctttggtaagatacctttgaaacattttatcttaattcaaataaggatacttggtcttagtgaaaaatataattacttctccaaaaaaaagtgaaaaattaaattatgcctttaaccttgtgtgtaagccaattttcctctaatttaaggaccaaataaaatgctaattatgaaattaagtttaattatcaatttaaaaaattaaattaactatattttagttgaaacaattgttcaaatttaatttctaaaatagctcgaaaaatattttttttaagagtattgctattaagtacgaaaaaacagatgcacaaaacatacgaatcatcacatataagttgttagatctttttaaataattataaattaaaaannnnnnnnnnnnnnnnnnnnnnnnnnnnnnnnnnnnnnnnnnnnnnnnnnnnnnnnnnnnnnnnnnnnnnnnnnnnnnnnnnnnnnnnnnnnnnnnnnnnnnnnnnnnnnnnnnnnnnnnnnnnnnnnnnnaaaaactaaaaaaaaaaaaaaagataaagtggtttgttttaactggaaacaactattcgtgtgattagtacgaaatcagtttccatttttctaaaaagcagcaagaatatattatgtaattaagggattcatatattttgaataaatcattaaatttacctaataatccttttttatgtgtttggttgaagttatttcgaacaaataattacttttttatgttataagcatggtagtactattatttgagactatattcttcttttaaatatttaaaaatcgaattcacgattattaattaactgtgaacaattacatgtcaattgatatacacactactacaaacacagcgtataacgacggccaattcatcatgattgtccgaaactcgtcgtcgtatgtaggacggtgatatttttgtaaataccatgaagatttcttccactttaagggcaatacgaagacgttttcatcgaaaatcatcgttatttttgttgcctgtggtagtgacataaattaacttaaaaagctctctaattattttcttactatttcttagaaattattattttaaaattgaaaaattcaaatgtgtgttaataataataataataataaaatttcatgatgtttatttcactaagttgaatttcaaaggcgatatcgtgatagtacaagtaataagttactagtatttaattaattttattaatatattagttaatacattattatacattatttaaagtaaaaaaaagctaataggtgcgaattattggataaattttaattaaccttatcaatatattatttaattaattattgagaaatatagggacaaaaaagttacgtaaaatatttgtttaagaattaaaagaaaaaaattaaaaaggacagggaaaaagaaagaagatattagaaggacagactcgtaaacatctatttgacaaagtgggttgtgagggcagagcgagagcgagagggagagggccttagatcttattcagctcaactcaggtatctatgtttccccctttcaccttttctctctgcctccttccatttcttatattcgtcattcttccttccttaacccgttaagtcaagcaatttgcctttcaactgtttgatcaaagttgccaatgaaacaaatcgttttttttttttcatctttgcccaataattctaacttaactcatctttcactttttgggttttttaatatacaattacatactcagtcattttgtatttttacatgatgttgaatgttgtaatttatatttagttgatattttgaaatttgcatttactaaacatgaaatgaacttgcattttgtagatacattgaaatgcttggctgagagttgataatttcttgaagatagtcgttcatttcttgagttttatgtgtatgccaaaaatgacacacaaaaagtttttttttttttttttttttttttttttttttttnnnnnnnnnnnnnnnnnnnnnnnnnnnnnnnnnnnnnnnnnnnnnnnnnnnnnnnnnnnnnnnnnnnnnnnnnnnnnnnnnnnnnnnnnnnnnnnnnnnnnnnnnnnnnnnnnnnnnnnnnnnnnnnnnnnnnnnnnnnnnnnnnnnnnnnnnnnnnnnnnnnnnnnnnnnnnnnnnnnnnnnnnnnnnnnnnnnnnnnnnnnnnnnnnnnnnnnnnnnnnnnnnnnnnnnnnnnnnnnnnnnnnnnnnnnnnnnnnnnnnnnnnnnnnntataattatattgtaaaacagatatggttatcccacccccagtgaggcctcccaggattacacaatttctcaaaccttatgttctgaagatgcattttaccaataagtatgtgagtgcccaggtgattcacagcccaactgctactgtagcctcttctgcaagctcgcaggagaaagcgttgagatcaagcttggaaactagtcgcgatgtggctgcagctgcaaagattgggaagatactagcagaacgccttttgcttaagaacattcccgctgtttctgttcacttgaagagagagcagaagtatcatggtaaggttaaagcggttattgattctctcagggaagctggtgttaagctgctttgattatgattgtttaattgtaccttagagagaacatccttgttggatcttgtctaaatttatttttgagttttcgtcattacagcaagtcactcattgaacatatttctcaaagaccttagttaattacgttactagaaataagttgagtgttgatggttgcttagagtgtggagtggagtgtgtttgttttactcatttcccattttccaattcacttccaacagtttgcagttgaaaacttgcaaacccatgttcaacgtagatatggttgcttcctatttttgtgcattggaaagtgtgaatctactgtttgcatgatgtttgtgttcaactaaactaagggttttcaagcacacccttaatatcttttgtctaagaccgtaaaattgcttgaaggaatagtttacataagatatcaactgtgatcagctcaccaaaatggtagatagactaacaggacagtgctctcttgcttggatctcaacaccgagatgttctgctgaaagatgatgtagaaagatgatgcagtgctcttctgctacttgatctactcaaacgcaaaggaaagtttattagaacacaatacagggacatttggaatgtaaaatgaaaagaaaaacaaaacaaaacagatagctacatgaaacagcaaggtgacagcactttggaattggttggtacttggaagcgtcccgtattattcttttcgggatgacttaacaataatgcttgcacaagtgcagtctaattcttagttttaaacaccagaggccgataagaaaaatatactcacaaagcgagaaaaagaaagggaataaccacgcaaggacccttccttggatcaattctgccactttctacagatccattgtgaattgaatcttgtaaaaaatgtgtttgattatcagtataggaatcataatgctaatcatagaaatggattggatttatcccgatcctcatagtaatgaactaataataagctattttggttgtatttaagatttgagacatgataactgctgaatgcctgaaccttaactgctaacattagtatagacatggctccctttcaactgcttattaaatgagcccatatacattacatttgctttatgtttagatttagcacaatagaatatttatatgtccggagtattttccaatttccacactaaggagtaaaatcgtaatacacgactgctctagaaagttttccttgcagcatgatcgtgaccaactaattaaaatgactgtatacatgctttggtaaagccactgtagaacctcagtcaaagatgaacaaagaagaatgaagaagctatagaaaaatgtccaatcatacagcagaagtaagatgacatccaaagtatttcttacactcaaagttactatattattcagaggaatcgatatcatatttcatagccaaccctatattcaagactacccttttattgaaaacagtaaattaataacaatttatttgtaaaaacattttaatgcagcgggaaattgttgtagcaactgaaattaattttctgttaaaaggataaattacaatcagataaattcaatttgaaataccttatataatttttttataccatgatactcatacgaagtaactcgatcgaaaataatgattaatcttcgtcggagatcgtaaacacacacaaggtataattccttatataatataattatataatctaataattttatcattatataacatcaggtgcacgggttgattattgcattatttgataaagttacaaactgcatcatgaaattttaagttaataagattttattaggaaattaattgctactttgatttattttttaaaataattcaaattcattcatccgaaaataaaatgaaaattataaaatattggagttaaatttatttgtaaatacacaaaatcatgagtaaacttaatagcttagtattaaacaagagatgagaactaccctattatgcaacttctaataaatttcagcctatattaatcccacggtttatggcaaaatggttcctcccacttgctcaagtgataattaagagtggcagaatagtaaagataatttgcaaatatacccgctatatgatacattttttnnnnnnnnnnnnnnnnnnnnnnnnnnnnnnnnnnnnnnnnnnnnnnnnnnnnnnnnnnnnnnnnnnnnnnnnnnnnnnnnnnnnnnnnnnnnnnnnnnnnnnnnnnnnnnnnnnnnnnnnnnnnnnnnnnnnnnnnnnnnnnnnnnnnnnnnnnnnnnnnnnnnnnnnnnnnnnnnnnnnnnnnnnnnnnnnnnnnnnnnnnnnnnnnnnnnnnnnnnnnnnnnnnnnnnnnnnnnnnnnnnnnnnnnnnnnnnnnnnnnnnnnnnnnnnnnnnnnnnnnnnnnnnnnnnnnnnnnnnnnnnnnnnnnnnnnnnnnnnnnnnnnnnnnnnnnnnnnnnnnnnnnnnnnnnnnnnnnnnnnnnnnnnnnnnnnnnnnnnnnnnnnnnnnnnnnnnnnnnnnnnnnnnnnnnnnnnnnnnnnnnnnnnnnnnnnnnnnnnnnnnnnnnnnnnnnnnnnnnnnnnnnnnnnnnnnnnnnnnnnnnnnnnnnnnnnnnnnnnnnnnnnnnnnnnnnnnnnnnnnnnnnnnnnnnnnnnnnnnnnnnnnnnnnnnnnnnnnnnnnnnnnnnnnnnnnnnnnnnnnnnnnnnnnnnnnnnnnnnnnnnnnnnnnnnnnnnnnnnnnnnnnnnnnnnnnnnnnnnnnnnnnnnnnnnnnnnnnnnnnnnnnnnnnnnnnnnnnnnnnnnnnnnnnnnnnnnnnnnnnnnnnnnnnnnnnnnnnnnnnnnnnnnnnnnnnnnnnnnnnnnnnnnnnnnnnnnnnnnnnnnnnnnnnnnnnnnnnnnnnnnnnnnnnnnnnnnnnnnnnnnnnnnnnnnnnnnnnnnnnnnnnnnnnnnnnnnnnnnnnnnnnnnnnnnnnnnnnnnnnnnnnnnnnnnnnnnnnnnnnnnnnnnnnnnnnnnnnnnnnnnnnnnnnnnnnnnnnnnnnnnnnnnnnnnnnnnnnnnnnnnnnnnnnnnnnnnnnnnnnnnnnnnnnnnnnnnnnnnnnnnnnnnnnnnnnnnnnnnnnnnnnnnnnnnnnnnnnnnnnnnnnnnnnnnnnnnnnnnnnnnnnnnnnnnnnnnnnnnnnnnnnnnnnnnnnnnnnnnnnnnnnnnnnnnnnnnnnnnnnnnnnnnnnnnnnnnnnnnnnnnnnnnnnnnnnnnnnnnnnnnnnnnnnnnnnnnnnnnnnnnnnnnnnnnnnnnnnnnnnnnnnnnnnnnnnnnnnnnnnnnnnnnnnnnnnnnnnnnnnnnnnnnnnnnnnnnnnnnnnnnnnnnnnnnnnnnnnnnnnnnnnnnnnnnnnnnnnnnnnnnnnnnnnnnnnnnnnnnnnnnnnnnnnnnnnnnnnnnnnnnnnnnnnnnnnnnnnnnnnnnnnnntttttgcagtgaatcccaaaattttgatttatgcaacacaacttcagcagcacaactcaattatatcaagacccagattgcgatctattcttgtagttcccgtatcttctagagatgccagaatcagataaggtgtcccatacctacaaattataacaagttacaacaggcaagtcaatttcacaccaagaatcagagaacgatcaagaacacgaaagtattgttcatctgcacttttcacttacttgcaatttaccctttgagcctcctatagccaacaagaaggggttgtcctcagagaaagaaattttaaagatagccccctaacaaacaaacaccataaaaaagataccagtcatcagtgccaatttaacaaatatattatgattcgttgaagctttcccatttaaaaaataaaaaaagaaggaaacgtactgctctcggagatttagatgctacacaagagggtcggttgttcaacaaatcccaaagttttacctgtgagaaataatagcagccaaatgagatgaattccaatctgcaaagtacagtataccggaaaataacaaaattgacttcactattaccgttttgtccatggatccagtggcaagaagctgcatgaagtcatgtcaacagggcacaggttaaactaaaatacataatcagttgatattctaaccaaactgttgaagatacatacattgggtgccgatggattataggatactgaggtaacagctttgtcatgtgcatgaagtgtaaaggtagaactcggatctgatgaggaatcagagttggcagtccgtatatcaaaacccttgacaataccatcttcaagactcacctaacagaacaattaaatcactattagtgaaccaatacctgtgcatccacgaaatcaaaattgaaatttgatcttacagaataagaattggttattattttgtcataaaaaatgtgctagtatgttttatcaaaaaaatgtaaagaaaagaaaataaatgttagtactcaggtcctagaaataactataacacaccacaaaagagtgctcagtgtgcggatcccatgccaagctctctacatcagctgtgactgaccacttgtagccagaatgtgatggcatccttccatccttctgcaaagtgtaaaagctataaatattagataaatattagataactatatgaatttttaaacaaaaaataaacaatttttttaattggaatgcctcttttagcacatcaatatacaaccaaagtgtacagtataataagtaatcaatgacagcaaaatacagaaaagccgagtaacaaaggaatattggatcagatcattaccaagacgaccgtatgatcaaatgaaccactaagaagaacctgtggtgcatgaagattccaagcaactgcttgaacctgtgagaatagatggacaagagataaatttgaaagacatcaggaaatgtattgactcaaatattttaaagtagaaacagaaaattaaaaaaaaaaattgggtcaaatgattcaacaaaggaaggagaaattttttccattataaaaaaaatgtggagcattgctcaacaaagacccaaaaaagacttgtaaattcgtttctcacatacatatagattgaataaagcatttaattcaaagctgaagattaaatgattaattacataactgttccatcttggttcataatagtgcagcaaaaatcacctcaatctattgatgttttaaatcatatctccaaagttctaaattatataataattctaaggaagtgtgtcaacatgaagagaaaaaagtcggtttcatcaataaaatgaattgtttctcatgataaaaaataaattatgctctagctaatttcttgccttgtccgagtgatgctccattgtaatatcacacttcccagcaactacatcccaaatcttcacttgcttatcagcactggcacttgctagtatgttcctttttttaagaaaataaaagtcaagataaacttttaggttccagaaagcacatccaacagagaaaataaaagcagaatccagttttaattcaacaaacctgtactccttgttccaagcaagaccaagtactgagtcagtgtgactgtcatctttgtatttgattgatttctgcaagaaaataattttaataagaaatggccaaacatagttacttcaaaaatctataagtattaaaaaaaataaagatgaaagtctaataaaatagtacaagcaaaaatatggattttcacactagtagcttcaatgctcatatgcataagacatctgcaatttcggtttcatctaaagctattcacaatcccaaataaaaaagttacaaaattcagaaaacaccaaaagatatactcaattatgttagataaaccagtagttagtttagttttgttagctaagccatcagttagtttaattagttggttagtagttatttattagttagttgcaatcagtgaagggtatcacttagaacagatgagaggaaagggtgccatttgtgagaggaaactagggccttttggcattgggtggtgcggactgataagaacagagaagatggtgtagaatagaaaagatgaaatagaaattttatataagtaaattgagatattttctaataacataggtcttcgagagtctgcctctccacaattcagattgatccttctttgttttttcctccccttcctaatctggtgactggtttacttctatttatactgcatctaacatctattcctaatagacacaattgttcagaatggtcgtgattgttctcatttgtaactgctccagatctgatgttgttttggctccaagggttgcactctttctccaccggttgcacccttctgagttgcacttcctggtcccaaagggtgcgtctcttcaccaagggtcatgtccccttgattcacatctcttgaccttgcgtcccttgggtggatcgtgtctgttgggtgatcatcaagggtcatgttcccttgattcacatctcttgaccttgcgccccttggatggaacgtgtctgttgggtggtcagcactccttgggtggtccagaactgttgcttctcttactcgctgcttgcgagtatacgccctagtgatgggtggcttacgcttatcacggaccctcgaagttctgcaatgcagtaactaaccaggggagattttctctatcttttgtagtaagagatcaactaacccatatattagtagttagttagctacgatcattgaagtgaattcacatgtacaactgaagagtgcaaaggaaagcatcctgccattgtgagaggaaattagggccttttggcattgggaggtgcacaccatcaaagttctgcagtgctgtaaccaggggagattttccctattttttttctaataagatactaggggtttctatcattttattgagtcagaatgctaacaatggacaaatatgtacatggatttacatgaatgattaagtttcataagtaaaaagctaagctaagggtatcgatttaagtgcacatgcatatatatacttgcacatgtacaataatacttgaattatcaacaataatttgcaagttaactgcatttaaattttcaaagagcacaaacaaaacttacaaacagcacaacatatgcaatttccagaaataaatcataattaagtatgctgccattttgaggtaatcacatgattctaaggggattgaaattaacaaaaatgtagaacaaaaccttttttccctttttctttttctcttcaaatccacccaaaaccacacatggctgcacctcatcaatctgagatcaaaggaaaattacaaggtattcagaaaaaaagatctctctttttgtatatgaaattttagacagcacagttaaaatttatatactcaaaccacttacaacatcaaggtcccaaatttctatggaaggttccattgaaccaacagctatgaagtttcctgtgatcataataaaattattttaagctaataagataaagcaaagatatatcaagtaggtatcaagtaaaattttaaacaaaaattgcaatggtggtgatttcaggtagtccaaacctagacagttactcaaacttttgaagatttttttttaatggtctacacaacagaagtgaacagcatatactaatctcactttattttctaatgaaatgcaactttccattacaatttttccacttcacctttggatgatatatgaattgttcatatttttcatttttggcatactaaaatgaaggcagaaataatcagaggatataattaagacagtttacaagttttccttcagacttattattttttcacttttctaggagcgcccttcaattcaattaaatggtgagtgctgaggagggagaaaagtcgaattgcacaaaacaaacaatcaagcaactcgatcaacacaaatacacacgcaagaggtatcgtgcaaagaacctctttctcctcctttaagggggcaatcgagccaagctgtgcagagtggaaatgctggaataatgatattatggtgaggatacacgttcatttcactagaatcagcatcctcgataacccaaacctggcattgcagaaagaaaggagtgataagtatatatctgtataatatacgaggacttgacaagtcacaaaacaactaactcactaacctcaagataactgacttcatcctcagtacatgcataaacaacgacagaatcagttgggttaatgatcatgtcttcgagttcttcagaatcatcatcctgaagcatcataaacaacgtaagataataagaagacacgcgccgcaaccgcaacgctaataaaatgacaacaagagctggaacttacgcttttatctttgagatagggatccatgtcgttactgggataataaagatcaccaattccagaactgaacacctcaattcctaaacaaatgacaaacgtaagtttaagcagctgctgcattgcatacatatgaatacaagcaatgaatgatcatatagaatgcagaattacgtaccttcatcttcgtcatcataacggtccatatcaaggtccttcaacgcaagggttatttcgtcaaaggttccagtggaggccttgccaactgcatctgctacggttaatgcttgtgccacaacttcatcgttgttagcgtcttcattgtcactgtctccactgcacataaaaaaaaaattggatgttagggttttattggtgaatgataatttttgttggaaccaaacaaaaggacaaccttttggttgcgtggttggcgattatctcttgaatttcttcttcgggaggaggttcagccacgacaagttccgacttcgaaacccctttgggcacccacgaaatcgcagaaatcatttttattttgtttgtgttgttagagagacgacgcaactcaaccaaaagtggcagcagcagcaagcagagaagagggttttaaggaaaaaaaaaaaatatgaagaagaagaagaaccctccctttagcgggggaattcatgggccttggcccaatacagcccaacctgtctttatgtcaggggtaattctatttgtaaggacacatgaacaattatatctaaagatcaaatgtagtacttagtatgtactatttaaatattcagagcttgttttgaaatatctacatgttgtaaagatgtgtttgacgaagagattaatcgtgcgtttggattgtcgtttgaagaatctcaaacagatacctctacttttcgggacagtgaacatagaagcaatccctatcattaagacaggcaggcattcacgttggaagaaactgaattccaaacatacaagattattgaagaattcatttgttttgggatgatattttattgattatatctattcttaaccattaacttttagaaatatttcaaaaatagagtttataccttttataaataaataaaaaggatatattcttacttcttagtaatatatattttaagaaaaaaaagaagccaacggggagtagaaataacaatatggaaagtgtaaatactaaatacccattgtagatttgccgtctttgttgtagtattaaaactcggcccaacttcagttttccttcccaaatcccgctaaaccactccgtctctcacagtctcactctcaccgtcctcgctcgctccagcgtcgtggcttgctgctccacctttgatgtgagttcatcttaatgtattccaacttcaccctacttcatttcttttgttcttcttttttacgcgctaagacactacttaactctatgtattaggtttttcttttcattttatttctacgcttctacatgctatgccgcactttcagtaaggttgatctgtataactgcttaatcaaatcatctttagttttcatattctcaaactcatatttattcattataaataaatacctctgttgtgtagtctagctatattgcatattttcttttcttttatcttctatcgttttattttaagttaacctaagaggtaaattgaaacctgtatattcctatcatttgcttgtttcgtggtgtttccatgcgctaagatgcaacgtccagttccccttgctggcatatgtgcttattttttatttttatttttctgttttagagactacatcaaggaattgcgttcaaatttcaatgtgcagaacgcaacgcttcactttgacctagctttgtgatggaatgtgacgttggaggtgtctctgattcatgcattttgcacacttgcaagagaagaagggtttataatggctgttttcatccatccattgatatcatgacagaaactgaagcttccctacctatcttgaactcgtccggttattataccaaaccatctttgaaggaattagtggccagggagcttgttgaacctggttattgcagccatgttcctgatttcactgttggaagatttggttatggatatgtcaggtatctcaatgaaactgatgtcagggggttatgtatagatgaaattgtgaagtttcataggcatgagatagttgtatacagtgatgaaaatgataagcctgctgttggccagggccttaacaaggcagctgaagtagttttggtattagacagtgaaatattgaagtctaaggaggggaaggaagatgttatagttagcaaattaaaacaaattacaaagaggcaggaagcacaatttatttcccttgatctagtgactggtgagtggaaattcttagttggacacttcagcaggtttgggtttggtgatgatgatgaggaagactttgttatggatgatgctgaggtatatgatgttgagaaagaatcaccatcaaataccaatgaacttgaactttctcattctcttccttctcatcttaggcttgatcctgttaaaatgagagaaatgagattattgatgtttcctgatgaagaagaggtagaggacttaagctgcaaatcatcttctggtaagcagtatgtgcggcctttacaaagttcaactcaggcaatcaaccatcgatccaccccaccagttgctagaaaaactccatttccattacttgagtataaacatgggaattttgattcaaattctcctggaggcattttgatggttcagcagcataagggcatgcctcttaggacgataaaatcacaaggttttaagctagatctcaaacatgaaactccagtatctggaaactatgctcacaatatagttgatgctggtctgtttatgggtaagtcatttcgagttgggtggggaccaaatggcattcttgtacactccggtgcacctgtaggaagcagtggtaatcacaaactgttatcatctgttgtcaatttggagaaagtttctttcgacaatgtggttagggatgaaaataaaaaagtgaccgaggaacttattgatcatgctttggtatctccattaaattttcacaaaggaataaaccatgtgatgaaagaagttgaaattggtccctgcaagttgacacttcaaaagcttgaagctaatcgttcgaccctatctgagatttctcatcactattgtgatcttattgagcggcaattgagtgttcctgggttatcttccactactcgtttgggtttgacacaccaagtaatgacctgggagttaattagagttcttttttctgacagagaacaaaaaggtcaagtagaatctttgggtgctgacaatgaggaagatatgatgcaggatttaaaggaaatttatcaagatgttgaccgagaagcactccctctaatgaggagagcagagtttagttattggttgcgagagagtgtttcctatcatgttcaaaatcaaataagctctctaaatgattctgattatctgcagcatatatttgtactcctgactgggcggcaactagatgaagcagtgcagctggctttgtccaaaggagatgtgaggttggcttgtttgttaagtcaggctggtggttctactgtgaatcgctctgatattgcaaggcaacttgatatttggagaaataaagggctggattttagtttcattgaaaaggacagattgagactctatgaattgcttgcaggaaatattcatgatgcattgcatgacatcaaaattgactggaggaggttcttaggtttattaatgtggtacaaattaccaccaaacacttcattagccattgcttttcagacttataaacattttgttgatgagggaacagctccatatcctattcccctttttattgatgaaggaacatcagaggaggttatcagttggaacacagataaccactttgacatttcattttatttaatgcttcttcatgccagcgaagagacaaaattcagctttctgaaggctatgtttagtgcattctcttctacccctgatccacttgattatcatatgatttggcatcaacgagcagtcttggaagctgtgggtgttatcaattctaatgatcttcatattctagacatgtcatttgtgtctcagcttttgtgtgtagggaaatgtcattgggccctatatgtggtccttcacttgccccttcgtgaagattatccatatcttcatgtaaatttgattcgggaaatattgttccaatactgtgaaacttggagttcagatgaatctcagcaacagttcattgaggatttaggcattcccacagattgggtgcatgaggctttggtatgcatcatatttttttatttttttattcatttttttgtaaaaagaaaaatatcaatggcattcataatttgttgcagcacccttttaacttcatctttctctcatactaagttcccttgtttgtgggagtttaaaaacagattggagtggaacagaacatcaggggaacattccccatcatttcccctcaataacacaaattttgttcccctaaaattagggtggagtgggtggaactcaaagggtatcggagttctattctgttcctatattaatcttccaaataagcataatgatagctttgttccattcccttccctttactttctagtacatccctcttgttcctttaatgaaaaaaaaaaatacaagcacactgtatattctgattatactattaattcagtttatataaatgatttttttttttcaattggcttgagtgataaaacctatgagatttgttttttttaaggacaaaaaccgcttattagattcatatgggcacacattatgatcaatttatgtctaaaactgaattaaattgttgtcctggtgttctttactgattaatgggctatattaatgcttgaaatgttgcaaagttttgtatttttctttaaatgacttattgttgtttgaatggttttgttgtggcggtgcaggcaatttattataattataatggggatcactcaaaagcccttgagcaatttcttcagtgtgcaaattggcagaaagctcatgctatttttataacttcagttgctcataggttattcttgcaaggtaagccgtgtgtgtatattgcttggtaaaaaacaccttggagtactgaataatatttgccaaagtcataactatggaaaatcaaaaaataaggaaaaccttggagtaccgaataatatttgccagaaaatacctgcatctctcgtgcaagcttgctcttttatggacatttataaaaaaatcttcaagaaccttcataattcatatagtatcctaataatttcatcataattacgatgaaataatctaaaataacccagtaaatcacaaaagaaaaactcttcaacaactacatgaaaattcaataaaatattgttgacccccccccccacacacacaccccattttgtcctgtatcatcattactttaaattgctgaaagtcattttatcacaacttatttctttttcaatagaagaaaattactagatttattcttcttaattccagataagtgcatcatagataacttatttaatattttgggcagccaaacacgctgagatatggaggatagcaacttccatggaggaccataaatctgaaattgaaaactgggagttgggagctggaatttatatttcattttatttgatgagaaactcacttcaggatgataccaatgctatgactgaattggtacgtgaatttatagaagaggatcatccctcatatcatcatttatgtgaaaaatggttgttacttgatcctgtcatagtatgattgtgaagtgtaactaaatattaaacaagtttgatcctgcttgaaacatggaattgtcatgttacaaatttatcacaaaatatgatgatattttgggggcacacccacacatgcagtggtgcaaaagacaataatgcctgttacccaattatttgaaatgcttctagctggtgcaatctttccatgagataatcttttaatagacttaaaaatatgatttatgaagctaggtaacagttgcagtgtttgtttgctagatcagtagagtggatactcgtcgttgtgatttcaattgttagagattaagggaatactcctttttccatttgattgatcaattaaaatcatgtaatttcttgtttcaggattctcttgaaagtaaaaatgctgcttgtcaggattttgtcagtcagctaaatgaatccctagctgtttggggttgcagattacctgttgatgcaaggtatgtacagctcgatttctgattgttgacctgtttttaggttgtacagctcgatttctgattttataggccagctaatatacttatccaaaaccattttttatctggcagcggacttataaagaggcaaagaaaatttgataatacaataatatattagttttagttgctagtgttattgaatctggttttgcagtttgtttactacatcaaaaccacacgtctttatcccaataatttaagcacctgtatgtttttgacatgttatttcattagttggccatatttactatgtgatgggtcacccatttagagaagtttcatttgccatattcacggttattactgattttgcagggtggtgtattcaagaatggcaggcgagatatgtgatttgctactatcaggtgtaggtgacggtgctacccgtgatgagcagttttactgctttgacacttctttcagtgctcccattccagaagaccaacgctctgttcacttgcaggatgcagtgtatctttttaccagctatctctcagaaattgctacgtaattccacaatctgccatttactgtcatatgaagtcaaatagaatagaatttctatttgtttgcaaggcaggattttgatctgcatatgattcgtgagatttgtgactgtttttttnnnnnnnnnncttggtcttgtatgaaaagtatgagatgccgctaaataacattcattaattctgcctgataagtatgggataaggctttgttgttgttgtagttaactgaatttctacattacttgataaaagggaactgagttttgaaattgaataaattgggaattggatattctaaatttcaacttgcgtgccacttttaaaggaaaatcttgacacaagtcaaatatggtcgagtattgttcgctatcttgataaaattataccataatgcattacaaattacattacattaggggtgtttgtggtattggctaatcttgtcatttttttatattcagcgattttctttgtctttgtacggtttgaatttgagaggatcaattagttgtagtatataattttgacctgattgaagcttgataatatattgggcaacattgggattatttgcatattttatcattcaatttttattattttattcactgaattttttttcataaattttattatctaatttttttaatttgtatagtttgtaaatgatgatgtcactaaaaaagatcaattttttttttannnnnnnnnnttttaaaataatgtcgtttgttattaatataataataaaatgcataaaaataaaaaatttaaatggtaaaatatacgaaaaacaaacttgaatagtaaaatacatagaattaaaaacttgaatgataaaatttgtaaaaaagaaaaatttgtaaaatgatgataattaaatcataaaatatacaattaagttatgtattgttaaatcttattaaatatattttatgatttatttatatatatatatatatatatatatataaagtatagtataatgttatatcatacaaaatattatttattaagtaaagttttatcattaattcataaatgttgaaaaaagtatatcttcaaaacgaacatgagatattgaattgagttgagacttgaggcaatattatgaacattattgttttaatatataagaattaaagataagtatcaataaatatatattatgttcaattaattaattgagttaaatctcttaatatgtttgtaccttattaaaagtttaatgattaattattataagtttctattatttgttatgggtattcattctgaactttaacactgtccaagttcatatcatatgcgaatccattcgcggaagtctcaagtcagtctacagagggttaatatgatatatagctcactcactgaatattgtccaataataaatggacaagttgttaaaatgatagctccttgaaacaccatttacttctaaatattgttctcacgcagagaccacggacaaggcaataggtgtcacgtggaggggtaaggttaagaatgatttggtgactcgggatatggtgcctacaaactgtgatatttggagaacaagtagaaaacacaaaggagagaatgggatttggagatatatattatatctggtctttaattgctaatattcttttttaaattcatttatctttttttataagattatatttttaatttttggatatattaatttttttttacatatttttatttgattattttctttaaatattaacgagaaataattaagcaaatagagagataagaaaagataattttagaatgataatataattaatttacagatttaatatgatttattaaattaattattttttaagggatgcaaattagttaaaatgattttctaaatagggatggagggagacataacattaattgtttttttgaattttttgtattgttatttttgtttttatattatatttctgattgtaaatttctattttattcatttcgttcatttttgtaattttcttatttttgtttattcttttagggagaaaaaaaagatcaagatgtcacaaaaagaaaaatgaatgctgaaagatttgagttatgtattaaatgttgaatgaaaaaaaaaatcatctaattgtttatattatatggacatattaaatggaaattattttcacttattatcataaaaatgataaaatgataattgttaatcatataattattcataaatgattgatatgaattttataactcaattattaataactatgattatgtagttggtgtttattattttcacgataagaagctgagaacagttctcaaacttaaaatgcttgaagttaggttttcttgttaggtcatgtaagatttatattgataccatgtatgttgcacactagatttgttctcacctccgatccctctgcagaccttctcccccgtgcgccggcgtcaccttcctcatctttgctgccaccgagatccgcaacacgcagtggtactagagttggaagtaaatctacgccccgtgcctggaactttttctcagatgcaaggaggaagcaaaggagccactggaagaaggttttggtgtgccgccacaagcaccgcatgttgcgaatctagtggacagcggagattaggatgccggccaagaaagtgtgagaaattgttttcaatcctcaaattgtttctataagtttttatgcagtgatcagagccactcttgaccacaatattccaagttgtttgttaatactcaatggtttgcattaacctctcttgagaaaggaaagtttgcaagaactatgcacagagatgaggattccggtgaatctaggaagaaaaggaagaagttgattttaaaaataaaaaagaaaatcgtcgctgctgcgctggaaatcgccttctccagtaacatatacgacaaagagggactgtagagggaggaaagaatggatctagtgtgtaaattgcatggtatcaatataaacctgaaatgaatctaacgattattaaatgtggtccataatagactatctaaaggtgatccagagtagtcatggctttttgtggtagctagataaaaagaaacaaggaaacggaggcacgtgcgtgagtataaaactctgaaaacatgtatgtggaatttacatgatttttatttttataacttgtcattaatttcgttggcaatctctttcactcgcccttttactagtttttttctgtttaatttcaccaattaagagaatgtatttaagaaaacatatagcttaatatgttgaattttaaaaacaaatacgtactaatatatatggtgtatatggtgtagccgattcttaacatacaagattgactgaattttttattgataaaacgacactagaaatagtagagctgatcaaccactccttttaataattggtcataccttatcgcaaaatttgaagactggacctttaccacagaaacttgcaggaaagtgtatagattgtataattagattaatataaatttaacttaatgttagggtaaaatcatctttcactatcatctagtagtaattatttacttttaattggttaaaagaaatttgacttcccaagtatttgtcactgtaatcaaactttcttaagattaaattacaaatgaattaaataagtgattaatatattgaaattgaaattaaatcgtttgaataatattttggttcgattttttacgaaaataaatttttatcatatttaatttatttttcaacggaatttaatatttgtcaaaattcttttcttcacataaataggagtattaagaaaaaaaattaaacatagattattcatatcatgtgcagcacgtccctagtttattccttgtatgtggtgcagtttggcttattggagcaagaaccacgcgacgtacgattctgttagttaggctagatttagattgaatccttgcatgatatgcttcattaaatttgatgatttatactgttcttttcaaggtgtaagtaataacctcgtcaaatcgaagacgaaagatgggtcattaatagatagtcaatgcaggtgggcttgagtaaaaggggaaaagaagtggtgcgaaatactaaaataagaagtgacatcgcatccattattgaaacctcaaatcaaacaagtagacagagctggggtggtaaaaagaaagaaacatggattataaaaatagactccgagctgcttagtaaatagtttatatttcatcatcccagagatcactgagttggggcttggtgggtccgctgatcaaacggctctggctgatttgacttattttctgatgatcttcttctgtcaatgcccagtcaaagatctgcagattctggttcatcctctccttatcgtagctctttggcacaaatgtcacaccttgttcgtacaaccatctcagactaacctgggctatggatttcccatgagcctctgcaatctccttcagcacatcattctccatcacttcatttgggcccctgcttgcacctttcctcagtggagagaacgcagttatcactatcccattttctttgcagaactctcttagcttcttctgttgccatgcaaggttcatctccacctgtaacagtattaattaatcttatcattaatcattcccataaacaaaacaaaatacaacatacagagaaagagagagagagagacttacttgatcgaccacaggacggatggtcgcaacagagagcagattctgaagcttcttgacagagaagttgctgactccaatggctttggtgaggccaagtttctggcactcttccatggcttcccacacacccttcacgtcaaaaggcaagagatctgctacttcaattggaaatgagaacttccctggctgagaactcaggggccagtggatgagatacaggtccaagtactctagttgaagagttctgcacgacaaaaattgatgtaagtaaaagcattgatatatatatttgaagtaaaatgaatcagacagacttatagcatataattaagttatatatgtatataaacttttacaagagagcttttatagaagtcagaataaacttgtttgaaacgttgacaaaattttaatgaaattgattttgaaatgagatgatttatatttgaatgtttttattataaaatcaaattaggagtgaaatttttggatctaatgtaaatattacttaaaattgtttaattcataatcaattttgaacttttctcaaaagagatattaaacatgtaaaatcatatttaaaattaattttgtacttagaattaattatcaaaggtaaaatcaaagatgcacaaactcataaaagaagtttaattatgaattataactagtttttgtgtgaaaaaaaatgctcacttaagtgatttgcgcaaagctggaacgacaagatgaggatgattttcggtgacccaaagcttggaagtgacaaagaggtcttgacgggagacgaggccaagatcgatagcttccttgagagcttcaccgagagcctgttcagagccataagcagcagcagtgtcaaagtgtctgtaaccctgtttcacggcctcaatgatagcctcctttgtgtctttcttgcatgtgaagtcaggggcagatcccattccaaccactggcaccctctgttgggaagaggagtttggaaacactattgtggggatttcaatagcagcagccattgtaactctcaaagggttaacaagtatagtgtagtattccaatatttgttgatggacatagctgaagggcatccctttttatagtgcaacatttcttcatgtaattccaattgtttgggtttgggcagtctagctttgaaaagtcagcaattggaggtaggtgggttatagtgagctctacccccatccatcatgttctttttttatattattcaattcacaccctattttcaatcatgtaatattttttcccctacgacacctcggttgttgaaactcgcttaacagataataatataaactttaacctttgtcatcaagtacgtacgtcaagtcgtcaactgatccgtgaacttttgttgggcgaatctttcatgcttaaccctttcaagtgttaattgcattttaataaatttttaaaaaatattaataattaaaaaaaattcttatatcagattcagaatttaaattattcattgtaaagctaaagtataccacatatgtagtagtacggacgtatttattataaaatttaatttataaaaaatattttatcacggatcctcatactaaaatgttcgtatttgattattttgaaaataattggactctagagaaccattttctacataattatttgactctttttttggacatgcaaattcggatggatgtctatcattttcttaattccttacgtttcttgttgaccgcgggcaatctacttgacaaaaaaggtttcgttaccaacttgggtttcatgtcgccgaaagatttgttttcccaacaattgattagtcatttgttgctctatgcatgaacaacattgtttcgacacatgtgatgtgaggaaggaaaaagataaaaaaaaaaaaattgaaagttattataataatattttataggttaaaacagactcttattatttaatatatttttttattcctgtaaatataatgcgtcgactctttagatttgccatttcagtggatacgaaagtattaagcagggtaaacaaattttaatataatgagctttcattttaattaattctttgatagatgaataacatttgttcctctgacttattctatcatcttttcgtttttttgaaaagttttgattttctagctatgtacgtaacaaataaggggccgctgccagtgaaatgataataaaagacacaaaagacatccgtttcaaaattttgaataacaaacatgactccattaatttgtttagaataaaacttacatatctgaaactaagcaataaatccagctgcacataaacatgatgacaataatattagatggaaaagtagaatcctttaaatgagctatgtataaatggacagaaggttaacatcatgatagctgactaagattaactccaataacaatggacgagataaaataatagctccctgaaatctcaattatttaagaaaaatgttaatcagtattttaaatatattgattaacaaatttaaagtaaaaatattgttatcaaaaaataaaaattatgatatctaaaatcttttttacgttatcttataatttatataataaataatttattttttaatatcttaattaatattttaaaaatacttattaacaagacccattatttaaaaaactttgttcaaacttctttttaagctgttgaataatagtatatcgtggttgtgagctagctcttagcccatgcctttcaacgaaaattgtgcattgaacaggtcaagtgagtgccatccatgtgagaaggaatcaaaacaaaactccaattccagtccggcggcgcatctgtcactcatgctcattatctgttaaagaggtaaagacaacaaacaggccaggacctggcctccgtccaggacacaaatttttgaataagtaattttagtaaaaaaatttattaaaaaaataaaatttatgttaggggttctttttttgtgttaggagtctattttttgtgttacagacccattttttatctcttaattttaatattatttgtattttaaaaactttgtgtattagagacccatttttttcatcccttagttttaatattatttgtatttcaaaaaatttatgtgtcagggggcctttttttctatccgttagttttaatattatttgtatttcaaaaaatttgtatgttagggatccatttttttgtgtgttagaggctcatttttttcatccctagttttaatattatttgtatttcaaaaaatttgtgtgttaagggttcattttttccatctcttagttttaatattatttgtttttcaaaaaatttgtatgttaagggtccatttttttcatcccttagttttaatattatttgtatttcaaaaaaaaatgtgtggtagagactcatttttttcacttcgtcccgagccaaagaattttcaggatcgaccctaacaacaaagccaaactatactattaattactatttgtgaggatgaaataattgccaacccttcttgttggtaggctatgttatatttatttaaaccttcaaatgtaattaccaaaattgtggatcaactcataattattttaacttaattaatgataagttatgttatatatttaaaagaaataattttgtcacacgtattattttatcctatttgaataaaatcatcccatgtaaaattagtttgatcctatctttcatgttaaatacacaattttaaaatgggagttggttctaatatattatcttacattactcataatacaccattactaaaataacatgtgttcaaagagcattaactaaagtcaaacttaaaaaatcatgtgataagtatagtaagtattatgaaattcagttccattattgattaggtcaagctaataaattattgtaccaatgatccaataagtaaactaataattaatctaattttatttgatatatattaaaaaaaattaaaattatatatgacaccatgataactgtagctccttctcttgatgccaaagaggtgtctaccccaaaaactgatcaaaacaaagtttgtgattcccaaactagccatgtcttcaaatcaaaattactagatataccaatctccaaccacctctctctccacgtctactgcttcgagaacgtctctgaattcgccgaccgccaatgcctcatcgttggacccgccgccaaaaccttcactacgccgagacgcaccttatttcccgcaaaattgccgctggattgtccaacctcggaatccacaagggcgacgtcgtcatgatcctcctccagaactccgctgagttagtcttctccttcctcgccgcctccatgatcagcgccatcgccaccatcttcgcatgcccacgcgccttgcggcggttgggacgttcagggtgccctgaaccacgggttcgagaaggtctcttagggggtctgtggggtcctcgagggtgcagggggaggccacgtggaagacgccggagcaggcggagatggcgcaggagaggagatcggcgggaaagagggtgaggcgggtggcagcggaggggtggaggttgaagaggtgtagaatcatcggggaagatggtgtcgtggatggtccatttttttttttnnnnnnnnnnnnnnnnnnnnnnnnnnnnnnnnnnnnnnnnnnnnnnnnnnnnnnnnnnnnnnnnnnnnnnnnnnnnnnnnnnnnnnnnnnnnnnnnnnnnnnnnnnnnnnnnnnnnnnnnnnnnnnnnnnnnnnnnnnnnnnnnnnnnnnnnnnnnnnnnnnnnnnnnnnnnnnnnnnnnnnnnnnnnnnnnnnnnnnnnnnnnnnnnnnnnnnnnnnnnnnnnnnnnnnnnnnnnnnnnnnnnnnnnnnnnnnnnnnnnnnnnnnnnnnnnnnnnnnnnnnnnnnnnnnnnnnnnnnnnnnnnnnnnnnnnnnnnnnnnnnnnnnnnnnnnnnnnnnnnnnnnnnnnnnnnnnnnnnnnnnnnnnnnnnnnnnnnnnnnnnnnnnnnnnnnnnnnnnnnnnnnnnnnnnnnnnnnnnnnnnnnnnnnnnnnnnnnnnnnnnnnnnnnnnnnnnnnnnnnnnnnnnnnnnnnnnnnnnnnnnnnnnnnnnnnnnnnnnnnnnnnnnnnnnnttttttttttttttttttgcataacccggtccgggtttgtagaatcagtcggattgccagattttctcaaaatgggtctgatttgatcgggttatcctgaattaaatgcatgaacattcaatagtaaaactgatcaggttaggttattagattctgattagttcgacccgaccaacagagctaaaccggattttataacagtcattgtagcccaagtcaactcatgatcgtggtagttggtttcttgcataacatcgtggtcgtgttgatggtgatattttgatgtgacaccctttaaccttttcttactacttaacccaaccaactcatacatgtctacttataaataaataaatttatttacctttcttcttttcttaatattatattatttataaatttcatttttatatgtatatttataaaaaaaaatacagtatatatctatttttacacttaatagaggtatttaattttaaaattaaaatacatatatttaaatatattaggagaaaaaatattttgacataattgtgaaataaaatttaaaattatttatttgcaaataaaattaaaagtaggatttatatgttattttaaaacttaatatcaacatgctagtgcatagataattttgtaaaatttaataaaattcattgaaggtgatttattgtcaaaaactgtattcattatgttttcagaatacttttttgttatatatgttatgttttattaaaaaaattgtatttatgttattttaagaaaatctatatgttattataaatttatannnnnnnnnnnnnnnnnnnnnnnnnnnnnnnnnnnnnnnnnnnnnnnnnnnnnnnnnnnnnnnnnnnnnnnnnnnnnnnnnnnnnnnnnnnnnnnnnnnnnnnnnnnnnnnnnnnnnnnnnnnnnnnnnnnnnnnnnnnnnnnnnnnnnnnnnnnnnnnnnnnnnnnnnnnnnnnnnnnnnnnnnnnnnnnnnnnnnnnnnnnnnnnnnnnnnnnnnnnnnnnnnnnnnnnnnnnnnnnnnnnnnnnnnnnnnnnnnnnnnnnnnnnnnnnnnnnnnnnnnnnnnnnnnnnnnnnnnnnnnnnnnnnnnnnnnnnnnnnnnnnnnnnnnnnnnnnnnnnnnnnnnnnnnnnnnnnnnnnnnnnnnnnnnnnnnnnnnnnnnnnnnnnnnnnnnnnnnnnnnnnnnnnnnnnnnnnnnnnnnnnnnnnnnnnnnnnnnnnnnnnnnnnnnnnnnnnnnnnnnnnnnnnnnnnnnnnnnnnnnnnnnnnnnnnnnnnnnnnnnnnnnnnnnnnnnnnnnnnnnnnnnnnnnnnnnnnnnnnnnnnnnnnnnnnnnnnnnnnnnnnnnnnnnnnnnnnnnnnnnnnnnnnnnnnnnnnnnnnnnnnnnnnnnnnnnnnnnnnnnnnnnnnnnnnnnnnnnnnnnnnnnnnnnnnnnnnnnnnnnnnnnnnnnnnnnnnnnnnnnnnnnnnnnnnnnnnnnnnnnnnnnnnnnnnnnnnnnnnnnnnnnnnnnnnnnnnnnnnnnnnnnnnnnnnnnnnnnnnnnnnnnnnnnnnnnnnnnnnnnnnnnnnnnnnnnnnnnnnnnnnnnnnnnnnnnnnnnnnnnnnnnnnnnnnnnnnnnnnnnnnnnnnnnnnnnnnnnnnnnnnnnnnnnnnnnnnnnnnnnnnnnnnnnnnnnnnnnnnnnnnnnnnnnnnnnnnnnnnnnnnnnnnnnnnnnnnnnnnnnnnnnnnnnnnnnnnnnnnnnnnnnnnnnnnnnnnnnnnnnnnnnnnnnnnnnnnnnnnnnnnnnnnnnnnnnnnnnnnnnnnnnnnnnnnnnnnnnnnnnnnnnnnnnnnnnnnnnnnnnnnnnnnnnnnnnnnnnnnnnnnnnnnnnnnnnnnnnnnnnnnnnnnnnnnnnnnnnnnnnnnnnnnnnnnnnnnnnnnnnnnnnnnnnnnnnnnnnnntattcacgggttgaattaatttaggtttagggtgagattgaatacaaaataatgatgcatatttaattgcgttgctttgatttgagttttgaaacttttttttcccaatcctattaaagttgggaatggtttggatcatcggattatggaaaaaaaattattatatttttctagtttgtatctctaattcttggttattttatattcttaattttcacaattacgaaaatatcaaccaattataatagtttattgttaaaatatttaaatagtaatagaatgataattgtgtaataatagaattaaaatcacacaatatactaaggatatgatttagtttttagagttccttcgtttaattcttaatatttatttgaataaaaatatacttaatatacaataaaaactttcaatcaaggaagagaaaaagtccaggaatctaactcgattagttaaataaaagtgtgtgaaatattataaatctagtaacaaagtcttttgattctcacgaattaaaaaaaaaaaaactcactaatgccttattgttacctcacaaatctataattgttgtattgtatggtctcacattttattacttgctagaagacagctcattaaggtgtaatgtaaaggaacatgaagtcatgaattataaaatgcaaaccggggcaaattaaacatttgaggtagtagtaatagtagtttaggagtttaattatatttcatcatcccaaagatcattgagttggggcttggtgggtccactgattaaacggctctgatatatttcatctattttgtgatgatcttcttctgtcaatgcccaatcaaatatctgcaaattttggttcatcctccccttatcgtagctctttggcacgaatgtcacaccttgttcatacagccatctcagacaaacctgagctatggatttgccatgagcctctgcaatctctttcagcacatcattctccatcacttcatttgggcccctgctcgcacctttcctcagtggagagaacgcagttatcactatcccattttctttgcagaactctcttagcttcttctgttgccatgcaaggttcatctccacctgtacgtaaaacgtagttgttattaaacattaattaacctcatctcatatgcatcattcattcacataaacaaaacaaaaacaacacacacgaataacgagacttacttgattgaccacaggacggatggtagcaacagagagcagattctgaagcttcttgacagagaagttgctgactccaatggctttggtgaggccaagtttctggcactcttccatggcttcccacacacccttcacgtcaaaaggcaagagatcttctacttcaattggaaatgagaacttccctggctgagaactcaggggccagtggatgagatacaggtccaagtactccagttgaagagttctgcacgacaaaaaagttgatgcaagtaaaagcattgatatatatatttgaaggaaaatgaatcagacagagttataagttaaacataagttatgtataaaaatctttacaagtggggaattatgaggttgatttagtgaagaaagaagcaaaggaggagaggcgtgggttcgaacttcaaatctcacttccactaataataaaattaacaaactaacaactaacatttatcgataaaaaaatgggcttaaatgaagttgctcacttgagtgatttgcgcaatgctgagacaacaagatgaggttgattatcagtgacccaaagcttggaggtgacgaagaggtcttggcgggagacgagaccaaggtcgatagcttctttgagagcttcaccgagagcctgttcagagccataagcagcagcagtgtcaaagtgtctgtaaccctgtttcacggcctcaatgatagcctcctttgtgtctttcttgcatgtgaagtcaggggcagaccccattccaaccactggcaccctctgttgggaagaggagtttggaaacaccattgtggggatttcaatagcagcagccattgtaagtacgtagcttctcaaagtatggaaaagtaataagtattattgtattactgttaatgcagttgatggatggacaaagcccctttttatacaacaacaacattgcttcatgtaatgtagtctattcaaattccaattacaattccagctattttggcataccaactttgactgtggaattggaggttaggtggattatgcctctaccgacccattatattatttttttaataacaatatataaacatctcattattttaaatatatatctaatctttttatttactttttcttgtgatatcaatagttttattatataattcttttctctaagtgttaaataatataatggatatccatatcatatattttttttctttttttattgaataaagaagccatttcaacattattctttgactctttctctttttttctgacggagggggatttgtttgcaattttttttaatcccgaatgtttgttgtcactttttttagtcacaggcatggtttttcattacgaaaattttgcttcagacgtttgaaaacataatatttttggcttttagctttcaacaaaaaataccgtgatttttgtttttttatctctctaaatagtagtttgtttttttattaacaggacatgatgattattgatcacttaagcaaatttcgacctactctatactctatatcacacaccaggaaataaaataattgatgacaaactttacaaaatagtgggtaggctgcattcttcaaaactgctgcatgatcatttcaggacgcgattgttgactgcaattatcttaaaagaatcaattatatatatatatatatatatatatatatatatatatatgtatgtatatatgtgtgtgtgagtgcgcgcctcctaatatagaattgactatttttatcttgttggccatatggaaaagtttgcgtaagaattgcagtattttccatgcatatagtttaggattgaaaagctagtgtgtaaagtagttagatagcagacgatatttcacacaaaaaagaaaaaaaaaatcaccatctaattatgataacgaataatatttgtgagaaacagttaatatctatgctttgtatattcaacaagccctttctatcaagtttacgagtgatgatacatgaatattcaatgttttttattcatctaacaaatatttctcatttctctccaaattatctataaaacttatattttttcacttttatttttttcactaggtgttcataagcataggatgatcatctataatttctctctaagttggcaatgcttatttgtcacatccaattttcaaatcaactatttaaaaatgcatttgaaggactggaaagtcagcagctgagctgactctttgacttgttaaatttttctaaactatatccctatagctcgcttatttagttttgtgttgttctatagctcttcatccattaagataaactaacagagaaattagttcatgtaatcttttatactattatttaattataagttaatttatatgataagcttgataatttttataataattattttaaaagtatatttattataattttaattgattgccagtgtaaaatatttggcactaactatatataaaaattaaactcaaattgaaaacaattctcataaatcttctcacctctaataatggaaatcgaggatattgactataagttttcttctttcttgagtgatttggccggggggttcaaagaaaannnnnnnnnnnnnnnnnnnnnnnnnnnnnnnnnnnnnnnnnnnnnnnnnnnnnnnnnnnnnnnnnnnnnnnnnnnnnnnnnnnnnnnnnnnnnnnnnnnnnnnnnnnnnnnnnnnnnnnnnnnnnnnnnnnnnnnnnnnnnnnnnnnnnnnnnnnnnnnnnnnnnnnnnnnnnnnnnnnnnnnnnnnnnnnnnnnnnnnnnnnnnnnnnnnnnnnnnnnnnnnnnnnnnnnnnnttttgacagaaaaaaaaaacgatctacttgattgggtactcatagttaagactcttttttttttaaaaaaaaatattgaatatatgatgcatcaatatcatgataatttattgcaaaggatctaattgaatctttttaataataaagggctaaattgaaagaaaaaaaatagacaaaaaaaagtaattaaaccaatttcaaaatctatttctcatttttgtctcaacggtctctttaactcttgccatttttatcaacataagttacccattaatactttatgggtgacaaaacaaatttgaactaagcgtttgcatattatgttattatgttacgatccatctcatatattatattattatgttactcttgccatttttatcaacataagttaccatgaaatgctggaaatcccagaaatttactggggtggtccctttgtagcctttagaggcattgctgccacatacatttcatctcttcctcttaccattgctgagttccaaaacaaagataccatttttctctcacaaagtcaaattctatagggaaaaaaaaacaaaaataatgcttttttaataaatatttaccaatttgagactgtttggaaactatatactaatgtggggctgtttgaaaactatataccaatatgaggctcaattggatgtgactaaatcggtctctaatttcgtcgctaattcgattgctaacacttttgcgacagaatattatgattttttatatttatgaccataatattctgtcgcaaaaagtgttaccaactgaaatagaaatcaaaatttggcgtgttttaatttttgacgtaaaatattatttaatattattaattgttatatattttttgatttttttatataactaatttttaatataatattttatttaataaaatatttccaattttattttggaaattgaaaaaattgaaaatttttatttttttaaactgtaaataactttaaatatagaaagcattttaaataaaatattatattaaaacttagttatataaaaaaccaaaaactattaaacaaaatcatataaaaatttagagattatattaaataaaataatattaaaaaatatagaaaatatattaaattaaataatatattaaaaattaaatataccaaaaatctagaatatattaaataaaacaatattaaaaaaaaagtaaaaaagatcatatctatgatgaagatcggtctaaaaatactttcaaattagataaaaataacaattaataatatgaaatgatattttacatcaaaaattaaaacacgtccaattttggttgttatttcaatcgctaacactttttgcgacagaacataatggtcgcaaacataaaaaaccataatattctgtcgcaaaagtgttagcgaccgaattagcgaccgttttagtcacacccaaattagacgtgtttgacagccccatattagtaaatagtttccaaataaccccaaattggtaaatatttattaaaaaagtattattttgattttttttcgaattatataaataaaagatgcacacaacacaatacatcactaaactcaactcaactctatccgcttcagcttttgtatgacagagtcagacaactggctcaaattgtatgttcatatatatggggaagaacatatccaatattcaaataccagttactgaagttaagacacctaaaaaaaccagttattttactttaaaataatatttaaagttgatttttttccgaagaataaataacttgcattttgcattatttatcgaaaaaaatacttgcaactttatttatttaaattaattgtatacattttttataaatttttaattccatgttttaaagttttatttaaattaaaaaaatactcgtatgataagaatatttgttagtttattattttttaattctaagattcttagcaatggatattgttattttcctaggccactactctaaactcacctcagcccatacagtttaaagagataaagcaaggcaggctcatgctatttgtactcttattttgctctttgcatgctcgcccctattttgattcttatattgggaattacagtgagactatcaactgtatggttagaaagggaaatatccacagggatacaataacgcattgaacctgaatccaaaataatatttgtaatttattatataaaaatatttttggaaactatcatcatatactagaacataacaaaaaaagtgaaaattgatttctgtaaaatctattaaaagaaagtgaagttgtgaaaaagggtattttgggaaaataacaaaaagagaaggtgtgaagaacaaaaaggaaggtgtaaataacatgataaatatgttgtccaaaagacaataggccctacatacaacatatttaaaagtccacttgtttgaatatgtttgaattttggttaggagagttccaaaaatatgtttgagagtaaaattagtcatgtttggttgtcttataaaaatatgtttaagaataaaattttgctctaaggttacaaaacatgcttttaaataaattaatcctaaatgtgtttgagtagtaagttagagtgaagaagcctcatacgatttttactatttttttaagcgtacaatgataacaataaaatttaaatctctaacatattatgtgattcatattagataaaaataaattaaacatatatatgtgagaaggacttgcatgtcttgatcttacattgaatgttgtgtgaaggtacatatgtttccctcatgtcataataatcgatggagatctatttgcacttttgcagcctggtttatttttatccctaagtggcagtcgctaagtagtagttgttacctctacttttaatctcgcatttatgcattccattactactatgaaagagaaatttacaagaaaataatttaaagcgccagtacaacagatccatatccagttttatggtaaaactcgcaaaccagtattagatgcacctcattatattggatgtatcttcttaacctgattcatatatctatatggactatggtgcccgcgaccgaggttcattcgaatctttagtacgggcaggtggccaacgacatggaacacaaagttactaaatgacgtgaacaaatcatataaataatctacatatttatttgaacaaagaaagttaccctgcatgcagaatcacacaataaggaccataacgtacttcaattcattggatcaaagctcacagtacataaacagatcgaaatagtacacgccatgtggtccttgtactgatggttgacattcgtaaacttaagtgggtcatcactcattcctagctagacattttattagatcactaatcaaagaaaagaaaagacatggagcaacaagacatggcatgatgcaactaaaacagtcacataaactgcacatttcccctcttcacattctttactcagtcttctcagttggagcctctgtgcctgtgactgtgacctcctcactcttctcagcttctgcttctgcaatcacttcctcgtctttcttttcagctgacccttctttctcctcctcacttttctctgccggggcttctgtgttagcctcttccttagtttcagcctcagcttctttctcttccttagcaacatcttctttctgtgtttctgtcactgcttctgcagcttctggtgtcttaacctctgcaggatcagcattttcttttgcttccacagcagcttcttgcttcaaagtttcctcttctgtcttctcaactgttggctcttctgtgacagtttcagacacaacttcaaccgagggcttgtcttctgaagctgcaggttgtggggcctcagtactttcctccttggtttgcccagtgacgacagtttctggtgttggtgttggtgttggagtctcaacaacttcttctgtgttcttctcctcatcagccttcaatgatgcctcttttgtgtcctctgggagggcaaactttgctgacacaacctacaatttcatattccaacagacaaagacatattcagatgaactctgctgagataaaaacttaataaggtggtggacatgcagtttaatttaaacacttcttactcttctttactttgtaattattggttaatgtatcacttctcatagtttttgcaatatatattacataaggataaagtttcaaagctgtcagattaatatagatttaatacgtcttttaatactctaacaaatatgactgatggaaacggcatatgattattgtggcttctctgtctgatgacaaactaattgaaatttgcattcagctactttgtacttttctatataagtttctgaggaaaacaagtatatgaactctttttgacaaagctatatatatatattgataagatgccaagtgcctgctgtcattttactgaatttaattaattaggtgacaagaatttcaggaaaaaaaatgacggtgggagtattgaagctaaagaaatgaataacttcctgtctaagataacagagaagcaagggtatgatgatannnnnnnnnnnnnnnnnnnnnnnnnnnnnnnnnnnnnnnnnnnnnnnnnnnnnnnnnnnnnnnnnnnnnnnnnnnnnnnnnnnnnnnnaaaaaaaaaaaacccgaagcaaggatatggctgagatcaaactgaaaataaaagaaatttatgccaaattaaaattaacataagggaatttatttgcggtttctgaactgagcaaccatgtgaactagagtagagtagcaagtattttagtagagttacctctacagtggccattggaataccaaagaaaatgtaactgattgaaaagaagcaaagttgacagtgatatagaaaactaaaagcttttgatgaaaagaaatgagcattaagagtggtttataaagaggtaaaggcctcaagttgatcaaagaaacggaaaggtggggacacttcaagaatcttgggatttgacgcatccttcactgaatgttaataagcatgtttggcaataatggtgacaaaggcttagagatgaggttatattattattttataatggttatttcagatctcctctactgggaggctgaataatggagcacgatttttcattgagatcatcattcttttggttctaacattctgtgctttgtgcagtcggatttacagggggatttaccaaattcaatgcatggttattcaatcatgatttagtggtaaaataataaaaagtgcaatgtgcttaaaacaaacggttcttttagctaatttaacagtaaataatactgtagtacatttcttatgtacaactcaaattcatctttgagaaatttaatgacaggatactcaaattataacgggtagatagataatttttcttcttgtgtaagtctcctagatgatctcctttcttcttcaaataatgttcagcagtcgatagcaataaatatggataatgaataagaattaacagtaattttacctcaatatttaactatttatacacactttagtgggacttgaatctatgtaccatttctcaagattatctttttaactaatgtatctctaattatcatcagggagttaaattctccactaatgcttgtttattatctaatttagataattttacctttaaataagcaatcataggtgaggtgagttattcagcatggccaaatacttggcagtgatatgagtagaaagcaacgtttggggatcatgataacaaaagtgtttgggtattcaacatggcctaatacttggcaccgacctgaacagaaaacaacctatgaaggctaggatactaatagtgatcgggtagcactagcatgaatataataatctttgaagaacatggaaacaacaatgtctgaatattcaatatgatcaaatacccgaactttattaaattaaaaaaaattattttacatttatgtcctaaattcgagatcttaagcataataacaatcgtaacaagaatcctcaagaccttaacccacagcacagaattgtcgatcctactgcagaggatttgtttgcctccaactccaaaatagaatgatgaggcctaagaataacaatttgtgtatcacatcaccattcacattggaattatttacctaacaaccacacacataacagtaactctggtagctgtaaatctggaaacagacacctgaaaaaaaagttcttgcaaaatgtgtttgtccgaggtttgaaaaggtgcaaataatgccttagtaaaaaacactaggcaacaataccatccttcttaatatgttgccgacatcatgactgtgcatttttgcaatccgagagtaacaaaaagtgaaactaaacaaaaaagttccaatgtttattttattagcaaaataaggcccgtaagtaaccttttacttttatgctccacaagtaaataattttaatgaaattatcatctatactttttatgatagagtatatgagaatcggtgacacaagtattttaggtctcatttcatatgatacctttgataaattttgaatgtagtttagtgggctgtctgctatcttgcgtggaaatgcccatgatattgacaccctctttttgctctttactctctccactcttttcttttatattctcaaaatatccctttttcctctcaccttctcaaaatatccctattacactagctattaggttcgtctatctatatacatacataagagcatctccaatacaagaaattcaaataggttcgtctatctatatacatacataattaaacttcaattgaaactttgagaatcgtcgaatcaaaattttaactctgattgttaatccaattcagttatataagcctttatttcaatatttttacatcattagatcgaaactttaacttcaataatcgttgatataattcaatttatgatgcgattaatttaatcaattgaaatcttcaataatatcacataattaaaattattatctttaaaatcattaaaaatattattttaaaacaattaactatatatatatataacaaaaattatactatgtcaacaaatttaaaataaattttaattttgataataaatgcatttgaaaattactacatattaacattatatcaacaataaataaaatatttttttaacaattacatagtattatatattcctgtttattatttttatattctttttgaatttatatttttcaaataagaaaaatagacttaaaaataaaaaataaatgtttgatcatgatttttctctcttaatatttattttatatactatttgaataaaaatatactcttaacatacaataaatagcaacacaattgatttagataaaaataaaaagataaaaagaagatttacaaaaatattttaagagtattttttttactgtatttctcattgactcatgtatatcatcttagttaaaaaggttatattttcaaagtgatgcttatttgtcagtaaatagtaagataattttttaatcctaaaaattacaaaattgaaatgaaaattctggtctccttatcagatgagtcaatatatatatataaccatgtcatgatgtcagacatttacaaagatttcggatcaccacatgaccatttccgaaaattagccataaatttatgtctcttcctaaaacattgccaacaagacaagccatttttcctttgccatcccttgcctttttttgcttctggttattggtcgttgttgggttttgtgagacacaaacaattattgtttttttcagtttcactaatcccttcaaaacattatttttgcattgttgccttacgtagtcttcgttgcttaattatatcccatttgtttgtttgttgggattttttggtcatattattgttgttccctgtgacggttgatgagttaaccaccttccctgttggagctgtttcaagttccaagaagatggggttcgatgaaaacaaagaaactggagagaaaagtcatcatgcaaatgaagaacattataaaagtgaaggcgagcccttgagcaggcacgtgagtgagtcctctatctatgcaactgaagatgaggaggatgaagttggatccaaattacaattgggtcctcagtgcactcttaaagagcaccttgagaaagataaggtttgtttctctgtgtctgctgaaatttatcgtcatgtcatgtttcatgcttcattccttattgattaattctcttttccatttctttttttggttgaattttgggattaatataggatgatgagagtttaagaagatggaaggaacaactccttggaagtgtggatgtgaacaatgctgcaggtttatatatcacttaattaatttttcccttataagcattctttttttattgtattcagaagaatcagaacacattagacatttgacttattctgttcaagttggtcggactattgcgcaagcatgaaagcttataatattcaaatttacattatttctaaaattaatataagtgttgacttatgcaactacaggaagattaacatgaggaaccatgcaaattggcattttttgttcatgtaattaacagtttgaggaatcataatattcactataatccattaaaacttcaaaactagtagttgggatttttgttttgtgaacaataatccgaagatttcttttatgtgtatgtttgttatatgttctttttttataaacctgtatcaattattacgttaatctttttctttccagaaattctggaccctgaagtgaatattacttgtttgtctatcatctctcctgatagagatgacattgttctttccattcctgaaaatgggaatccaaagggtttatggtttactcttaaagaaggtagtcattaccgcttgaaattcaccttccatgtgagcaataatattgtgtctggcttgaaatacaccaatactgtttggaagactggtgtcaaaggtaagttttttttttttttttttttttttttttnnnnnnnnnnttttgtggcaaatctatttcaaattaattaaacttataacatgcaaaacttgatcaagcactctcttacaacaattctaatttcagtggatagctcaaaagagatgcttggaacattcagccctcaggcagagccttacacacatgagatgccagaagaaaccactccctctgggctatttgcaagaggatcatattctgcaagatcaaaggtaatattacttctaaatacattgaacttgattgtacaaatatacacatgcactcacacacacagcttcataattggattatatatattcctcttaaatgttgcataaaatagtcacgacggctcactaactctgcctggggtgtggggctacctattattcattcgtccattgaatcactactatacttgattcaaagggttctcaatcattttattcgaagtttgtcatggttttgtcatttcagtttatcacttccataattttccatttacttctttcattctttcctcattttttgtaatgcttctttattagaagtaccatattgtctggctttaatttaatatattctggtcttagtttccttgtaaatggattacggtcagtagtggaatcgaggtttgttggtcaccaacttcttgtgttcttcttaatagtatgtattgcatatcatcatagtagtaaaatttgaagcggtgcttcactgcatactatgggatagaataacatttgtattttcttctattgttgtatgataatgaattaatgatacaaccatatactatcatatttttttgtttttgcagtttcttgatgatgacaacaaatgctacttggagatcaactatacttttgatattaggaaggaatgggcttgaacgaagatggcaatatacccaatttgcatctgcaatagtaattcttattcattttgtcaaatatatttttttatttctattgtattgacttgagaaattcagatatatgttaggtactaaattcatgtttgtactaaaaaaaaaaaaattggtattgactaaaatagacagaggcaaagaggactcttttgtaactttcccaataaaagttccctagttgtcaacttctttagtttttatatctcttcttagctgcattacttttgccaatctaaatttgggacacaataatctttttgctagtccggttgcttgagttttgaatgtaatttgaagtatgtgggccgggcttttcaaccaatgaggagtgaaaatggaaaataatctattttattgggctactaaaattccggataagcaaattcataagagaaaaaaacttatattacagattaacaaatccgcaaattagatctgataaaaaaaagtgcaagaaggaggaagaaacaagaagggaatgaagggtgagatataatgggggtgtaaagtcgaatgtgcaggaaataaggtttaagagaaaaagaagggtaatttgggaatactaaaaattatgagggcgcaagatataaaaaatgagaaattgaaactaagcaagaagaccaaatttgtatttaagtttttcttgatgggttaggttgaaccatcaactcttttaaaaaataaaataaaataaataaattattttatttgtcttaacttttttccaaatttgattttcaaatataattaaaaaaaaaacatgttattaaactagtaaatcaaataaatacttaaccaataatcataaaaaaatataaatgttaaatgtaatttaaaagattgatggattaaatgggttgggttatacgagttacgaaaatcccaatcgaactcaacctatttgaacttattatataagtcaaattattggatataactcgttttaacaccataatgttggtctcttatgaccgatgtcttattttttaggctagcagtactcgccttatccatcggtagttaccgttttctaaccacttttgttacatttgctgattaaacttgaatacataattttttctaacattattacagtccgtttttttataggaaaacattactacagtccgttagaattgcatctaatgatgattttctagacaggttagtgtcttggaaaatcaaaacgtggtcctatatatgccttgatggttacacaagcctaatcaatcaatttaataaatcttgagcactaagcctattacaagtcttgaattgacaacctacaaaagattatttactatgattttgcccaacatccataatgtccgtaattatatacatatggtatacggaaattatgagtaatgaactttaaccataagcattagttttaatttaatattatggaacaaaatttagttagttaaacttaacacaatttttttcctacattacatatatcttacaaaaagtaattttatttgaattgaataatatcattataaatgataaaactcttctattaaatatttaacgtaatttcatatttaaaattttaacttgaggtttcttattaaattgaaacaaatcctcaccagttaattcatgtgttccatggtgacacaaaaaaaattaattattgtgaaacaatatagtttgaggacttaaagagttaaagagaaatgcaaggaagagattatcaaaaaacttgatctcacattcatttttcatagttatggaagctctgtgcattttttatatagagaaaacaagtttattttatttcatgctagtcaccacatctttgattgtagtcatgtgcacttaataattcatatcaaaggtaaatgattattttgctccctagatatataaattaatgacaatttagttttcaaaagaataaattaaatatgtaaaaaaaaatataataattatgtattgttatataatttaatgttaaattgattcttaaaaaaataatttaatatcaaattaatcttttaacgttaaaaaagttaacgacatagagttacacaatttcaagaattaaaacgataatttaatttataaaaaaaaaaatacttttccattgtaggttttggggcatgtgaacagcatggtcggatattagcattggtatggatggctaaacgtcagcttcatttttggtgatgaaaataaataaactagaaatgaagtagaaaccatttatgtatgtcggttagctagatgataaaatggggagatggaaaatggtggggtagagtgcaaggttggtctatgatgggttaaagaagtaatttagttaaagcggatatggaaaggccaccatacaaggagagaaaaaagtgtgctccagagaagcattttccattaaagtataatatgtcttcaccaaagaacaccctcaagttagaagcatctctttgctgtagctgtagccaatactaaatacccttccagctggtatacttaccctccattctatctttatataccctccttccattctcattcctcgtccttcacattctccttctctctctctgaattcctcttattcatgtctgtgtgctcttctatctcaatatctttcctttcctttaatttacttttgttctgaatgtcactcaatttatggttaggtgcaaacttttagcttttcttgccttttcacatttgaatgtcatttttgtctcatgggtgcttgtgattttggatcagctagtctagatctgtctcatttcattatggggttcatgaaattatgttaattctgtcactgtgtacttgactggtctaagtctaactcacctacgtttggcttgggtttgacaacaagttagaaactttgtgaggaaaatgaactagtaatggattcattccattggcactggttggggggtgatgattgatagtttcaaaaaagaaaatagaaaatctttcaacattcatttcattaggtgtctgtctgatctcgaatttaacatttggaaatttagtcttctgggagttctgaatttaacatttttcagtagtgtgaagcaaaagtggtacattttaagtgttattcgcttctatcaaattgttacagtgttcatatcatacttggatctgcatttccttctgcttgctctggttcaattcgcattcctaaatcttaccttatgcatttcatattctgttgaatatcttattatttttcttttgttcctctatgttaacttttataagatctggttccagccattatctaagtctattattagtaagatgttgacaactttttagtgagatgtaaagaaggttaggtaaaaaaaataaaaaattgaggggtttatgattttttatttattggagattgagtttgaactgggagttcattttttattcccgcattatttaactttttcacaggttggtaggttttgttatgatgagatctaaccactgtggagctcttttcatacaggaatttggagagactgttgatatagcaaggtaggataaaccagtagccaaggaagatatggagttttctatgattttcattgttagcaacattatgctgcttttcagttcagcatttgccaaaactgctagtcctccctctctgagcccaactccagcaccagccccggcaccggacttcgtgaacctcactgagttactcagtgttgctggtccatttcacaccttccttggataccttgagtccactaaagtgattgacactttccaaaaccaagccaacaacactgaagaaggaatcaccatctttgttcctaaggacagtgcattcaatgctgtaaagaaaactaccctatccaacctcacctctaaccagctaaagcaagtgatcctcttccatgccttgccacatttctattctctggctgagttcacaagtcttagccaaaccagctctactcccacattcgccggaggggattacactttgaatttcactgataattctgggacagtgcacattagttcaggatggtccaagaccagggtgagcagtgctgttcatgccacagatcctgttgcaatatatcaagttgacaaggtgctactccctgaggccatttttggcactgatatacctcctgcacctgctcctgcaccaactcctgatattgcccctgctgctgattctccaactgaacacagtgcagatagcaaagcatcatctccatcatccactcatgatggctcctcttctcacaagctcatcagctatggaatctgggccaaccttgtcttggcaacttttggtgtgctggtgctcttctgatggcactcttcctattgaatatttaatttagattatgtttatgtatctacatttggtgccacttgctttgatttgaatccatttttttgaacataagtgttattcaatgtatgtatgaatgtgatttcttctattatactatttttttgttaaatctcatagcatgcggatgtcatgttatgtggttgtcatgttatgactgtatctacctttcttgagagttttaatgccgtcacttaaagttaaagtctattccgaaagttgattttattctctaaagggatgtttccggaaatcaaatgatttacaagctctttttacggtagctgaaattaaattaaagatgctgattttatattggaccttttaacgttccagctcctgaagacccggtatttttcctatcctagtggcatgtgacaagagatgccgttttgaaaaaaataatcaaggatatatttttttcaatccagatcttgtaagtattattaacattttttttttttttgggtctttgacagctttttgggtgcctagcgatttcataattcaaactctaatatttacaaaaagttttttggtccttgtaagtaaaactcgcacggtgttctctttcttctctattctatggcgggaggtttctttcgtatcaagagtgtggtgggaggccagggaaagacggattggatcgagaggcgatgcctactctactcaagtcttgaagtcaatttccaatgctaccttgctctgttgggtttataaagcctactgtatttgattgatacttcctcgacgaaaaagaaatgttgataattgtgagttgctaaagtaattttggccaacaaatctttgcaatgtcattttcaaaataactacaaagataattgaaaattggttcaagtatgagctagacgactttgtttcacctaatcagtacagtttcactcaggcaggcacaattccaataacagttatagtggagacagaagtgtatattaaggtttttatggtatctaaaattgatcattaaaatctatagcattatggtaattaaggttgatcatggttcatgaaaggctatagctttatgttatgcgttgagcttttttcaatgatacgcttcttgagatggaattaaatctagctttttggtgagttaattttgaagtgtatattcctttgctctttatgtctgccttaactcttaagagggttgcacaaacgccactgcatcaaagcattaatattaaggggttattatggatgcctataaaattagccaaagttggtcttccggtctcctcccatcttttctctgcttgctaaagctcactgttttattctttttggataactggatgcatctatcagtcaaatgcaaatggggtttggagtttggacctttactgttccagttggactccaggccagaagctgagtaaagtaaaaacaagactatttcagaagtatttgtttcagagggatcggacccagggaaaataataaaatttattcaaatgaaagtgacattttttgtaattaaaaaataataataaacaagattattatcaaattggtatagcttagtggggaagatcacggatcaatttccacataatacttttttgggaaggagtgatgatgaacttcaagtgtaattaagtcttggattgaaaattaatcttatatcatactcaaagtgtcaaagcttgtgggatggttcgagatcctaataagaagattttttttttctaattatcatgattacaaaaaaaaaatgaacaaccccttgtttgattagttnnnnnnnnnnnnnnnnnnnnnnnnnnnnnnnnnnnnnnnnnnnnnnnnnnnnnnnnnnnnnnnnnnnnnnnnnnnnnnnnnnnnnnnnnnnnnnnnnnnnnnnnnnnnnnnnnnnnnnnnnnnnnnnnnnnnnnnnnnnnnnnnnnnnnnnnnnnnnnnnnnnnnnnnnnnnnnnnnnnnnnnnnnnnnnnnnnnnnnnnnnnnnnnnnnnnnnnnnnnnnnnnnnnnnnnnnnnnnnnnnnnnnnnnnnnnnnnnnnnnnnnnnnnnnnnnnnnnnnnnnnnnnnnnnnnnnnnnnnnnnnnnnnnnnnnnnnnnnnnnnnnnnnnnnnnnnnnnnnnnnnnnnnnnnnnnnnnnnnnnnnnnnnnnnnnnnnnnnnnnnnnnnnnnnnnnnnnnnnnnnnnnnnnnnnnnnnnnnnnnnnnnnnnnnnnnnnnnnnnnnnnnnnnnnnnnnnnnnnnnnnnnnnnnnnnnnnnnnnnnnnnnnnnnnnnnnnnntaaaaaaaaaaaaaaaactaagttaagaatatataagattagtccaaccgtagtgaagggaggggggaaatatctcggattcgaatcctcaaactaacatttttttaaaaattaacaaattaatatttatcgataaaaaaataaaacaaagttattattatgtccttcaaatcatgaataggatttcaaagattaatgttgtgtccatttccaacaatggaacaattttgagaggatagaaattagtgtttttggtttgatagggactataaaggtgagaaataagtttaaaaataatgagattcatttttattattattttacctatttttactcatctctttatctcttttctcatctcttttctatttctctttaatcaaacaactttatttcttacatatttttacttttctttttttatttttatctacactatttctctcttttcaactcaacataacctaaaccatgatggcttttttatcaatatatttaaaaaaaattaagtctgcagctttctttttgttgagatttattttatctgttatggtttgcttttgttttgttaataagtccctatttgatttgttaggaagtatttttataaatataactgataaatttatgtgcatgattttgaagggaaaaaataagagaaaaaagtaaaataaatattgaaatcttagaaaaatagatagaaactagtagaatttgagtttgcaccaatttattttgtaaatattgagttttaagtagttttgttaacttttgtataaaaataacaatacattgtctttgttttggaatcaagaatttctaataatgttttcaactttaatcgtgtaagaaaacaaatttttggtgtttaaaaatgctgaaaaggttaaacgatgcactattctaacatcactattcactagtatatcaattcccaaatgccagttaacattctagacgcttgaccaactcctcgaactctaattgcaaaaaaatgttgaacatcgatagcgttccagtgtccctgatgctagcctgtgtgggagacactagactactatcaaaatcacagcatcttggatgctaggcttgcgtagcaggaactaaatatgttattagagaaaaaatatagagaccaaaaatattattaaaaaaatgtttagagacttaaaaacaattttttttaaaagtttaaggaccaaaaatattaaatcttactttgtaattgaactgttgttcatttaatgaaagttttattcatgagattgagtaatgtactctgttctcaatgctttcttgcaactaaccattgatgaggtttgtcttaaacgtgtgcatgatgagaaatcatatatgtgtgatttggatatgtccttatattcttaacaactaaatatttaatacatattgtgtctctttggaggaacctttataacttaagtgttgtaatatctttttgcaggaacctaccatttttcactcaaaatctcgtccatgctagaagacacatcgcttaaaatctaaaattgtagtccactcaaaagtccatcttggctaacattaatcagaattcaatttcgttcagtgtcatcccaagcatctaatccatcttatatattagacaaattaatagtataagtgactagtaaagaagttaaatacttatacaacttcgtgtgaaaaacttaacattgaagtaacatttgaaaagaaaaggtgtttttaatgtcagttagatagatattaaaggtcaactagagtaaatgtcaaagcggttgcatgtgatagttaagggattggaccatacatgaatggaactagagctctcacgaggttggctatagttcatttagaaaagagttgaccttcctttttttgatgcacaccgttctatttgtgtgcaattttaactttttaactatcttcgtcgtctaagtataacatgcttcatattcaacatgacatttaaaaataataaagttttggaaatgatggttcacatttatataaaaacatactattaatgaagttaaagtaaaaatatttttattgaaaaataaaaaattatgttattcataatatttttgtgttttactataatttttatactaaatgttttttcctttaaattccaccaatattttaagaacactaattaactagattattaattaataatacatgcataataacttataatttaatgtgacattgtcttgcaaatcttccatataaaaattcttattattttataaattatatgaaataaaaaataaatatatttaatatcttgaaaagttagaaagtattcaatagtttttttatctaataaataagaagattaataggattttttgagataagaattaaaattgttattttctttaagtcttgtatttggtttgattgcgatgaaaatgaactttctttttattgtttttggataaacagatacttaaatatcttcatcttaaagataaacgtgcgaaggttaggtaaggatgtatataaaggaaagcggaaataaatgtcgttactgagtctgagttcggaattttttttaaatgaattcattggattgcccttgaaccgaaccttactttatggtaaaatatagcacgagattaagaacattacatatatataattttatataataacgacgaaaaaattgtagaaggcgatgagatattttttggcttgtgaaaaagcaacaaaatagataaaaacaataagaaagcgaaggaaagaggagtgtggggattgtgaattgatgccacatgtcattcttgtttaatatttagggatatatatatatatatatatatatatcatttagcaattagcaattggcatttggcaatagcatagaacaaaaatttaattgatgtatcttaattgataatatgcgataaatttataagaaaaaatttgaatttgattttcataaaatacacttttatatagagatcatgaactttgactaagtcttaatgaaaaattaatttcataactaaaaaaaacaaaatttatagaaataacttaaaagtatcattagagagtctaacacgagtgaaagaaagaaaagcattgtattggtaccatttgattcgatagtatttgcgttgcattccctttcttcgcgggtcctttcgtttttttctctccaccccatttcctctttcgcacaatcaaataacacaagcctctctctctctctctctctctctctctgaagaagaagaagaagctccacgcaaatacaatgacgaatccttttgatctctctctccttttctgactttctcaggtacgttttctcaattcacctttcccaatcgcttcgtgccagccttgtcgcagtctactgttggatcggtgtaatttaaatattcacgcatcgttgatttgatttcaaaacaaatgtgttaactctattggcttataaacatttgattttcatgtgttggctcagtgttgttccgagtgtttgttgtttttctccaacagagtcgaacatgtctagtttcgtcggtgtccttgtttctgatcaatggcttcagagccagttcacccaagtcgaacttcgaaccctcaaatccaaggtatgtttctttcttcctctcttctgatgttttttttttttttcttcgacaccacaatctcggactcagaacatgcattgtgtatgtttgttacgttctttctagtatgtgtcggaaaggactcaatcgggacgtgttactgtcggaaatttgccacctatttttaagaaattgaagggtttctctgaactgttcaccgaggatgagattaaggatgccttggcagagtcatatcagaacatggatgaagagattgattttgagtccttccttagggtgagtttttgcttttttatttttattttaccccctgagaagttaaggcatggtttctgaattcctcctatgtgttcatgtgtttcttaatttaacttttactgtatgtatttagaatggtctgtttattgctttctcaaagaaattattggaaaatatacactacaatgtcatttgatgttcatattgcctggactcttcacatatatatgcacctaacatgaaatcgcgatttgtgagtacttttgtaggtattaattatatttatattggacctagcaacttattcagtgacattggatggcaggcacatttgaatcttcaatcccgagcaatagctaaagatggtggttcaaaaagttcttcttcattcctgaaggcagctacaacaactgttcatcatgcaattaatgaatctgagaaagcttcttatgttgcacatattaacaactacttggctgaagataaattcatgagtcagtttcttccaattgatccatcaacaaatgcattgtttgatcttgcaaaagatggagtccttctttggtagatgttcaggactcaatatcagctaattaaaaaatattgtctcccctttttcctccctgactttgttgtttattttattgctgcagcaagcttattaatattgctgttcctgggaccatagatgatcgagctattaacacaaaaaaggttcttaatccatgggaaaggaatgagaaccatacccttggcctcaattcggccaaggctattgggtgcacagtggttaatattggtacacaggatttaattgaaggaagagtaggttcaatccttgttttttccctctccatgtttccagtttcctttttttttatatgaccgacactcatttttgaaaattttcctgtttggttatttgtagccccatctggtacttggtttgatttcgcaagtaatcaaggtaaactactgaaacttccccccttttccttgcttaatatggaacttagatgaggaagttgacaccattttcattggtaagacatgtaaacttttgctgtcttttttgtttgtttaactttttattatggtggcaacattagattcaattgttagctgatctcaatctgaagaaaactcctcaacttgtggaattagtggaagatgacaaggtgatattggataatattattcctcttatttgtaatttacatgtacaatggttttctttcctttacatatgtcagaaatgtgattgaaataaacctctatattatatttaacatgctggcaggatgtggaggagcttatcagtttagcacctgataagctcttactgaaatggatgaatttccacttgaagaaagctggatatgagaaacaagttacaaacttctcttctgacctaaaggtgagggaaattcttactaactttgtatgctgacttactctaatagaaataattctggacatggatgaaatattatccagtattccttattaacaaccttttattatacacaccactgccttgatttttgtgccttttaaatcagtaaagaaactgtggatcttcttgttaggccttgacaaccatctgcaagtttcaaaggaaaagattcactatatttccctacatcatgccaattactgaatcattgtgtggctagtttttttatgtgcatggcatttgtgttcataaagagatatagtatgattctaagttgcatgagtctattatatctacaataatcttcttttcgcaggatggagaggcttatgcttacttgcttaatgctcttgccccagaagtggcaggtccatctgccctaaccacaagtgatccaacagaaagggcaaacatggttcttgagcaggcagagaaattagattgcaagagataccttactccaaaggacatagtggaggggtcacctaatcttaatcttgcatttgttgctcaaattttccagcataggtatggttctttttaaggggttgcaaatgtgctaattatttcattgtaaattcatacaatataacaataagaatcttttgggatatgcttccaagaacccatgctgttttctgcccttctatgaatttggataggtgtggctcctatatcatataacattgtcacttaagcttatgcattttatttgttatgattatccttaaagaggcctctgagtaataactaataagtaatggatctggctagtttgattcatttgttaggtacaagtaagtagggttagtgaaagttattaagttagaaatgtatacagtacagggtggatcttgagctgatttagattgtgagtttcatttatatatatccaaaaatctctgttacttgtacttttgtaggaatggccttacaacagttgacagccagaaaatgtcctttgctgagatgatgactgatgatgcagagacatctcgggaagaacgatgctttagactatggattaacagtcttggaattgccacttatgtcaataatgtttttgaggatgtcagaaatgggtaagttttccactgttcagttggctcatcatctgtgtcttccatgttcttataatttttgtttttaagttacatcttcttttgaaattttccttgatcttaactgctggttatgattttcctttaccgcagatgggttctattagaagttcttgacaaggtttcacctggatctgtcaattggaagctggccacaaagcctcctataaagatgccatttcggaaagttgagaactgcaaccaagttataaagattgggaaggaactaaacttttcattagtgaatgttgctggtaatgatattgtacaagggaataagaagctcttattgggtgagtttcattttttccctgctttgtgatgatttgttagtgctagaaatttgttatgattgtgtggttggtaccctctgatttaacatctgctttaaattctgttttgtcctcattcattggatattttgatgggtcaacacattattttatgcttctacactatagttaaatctgccatctgaagataatcaatagccaagatatgttcttgagatttattaccgaggaatatcagaatattctctgtggtgcatattcatgttatacaaatcaagatatataatatatgtggtacaaaacataaagctctaacccttatttataataatacaatgactggatgctactgaggattagtctcatggctttcaactatagagataccttcttttcagcaaaaaaaaaatagtaatacaatgatcatggtcctaattaaataaggaaacaaatcttgaaatataaggaaatagggaaatgttgagataatctaagactctaaattactcagagatacagtgaaaataggtttaaatatgtttttagttcaatatttttgcaagtttttttttttgtcccaataatacaaattttcatatttctttggtcccccaatgttccaaactgatgacatttggtcctcgacatcaattggggtctgttaaatgttgattgatatatttgtctcgtgtggctatagaagatgcatcatcagttttattgtgccacgcctctccatcccaccctcttgcccttcgcatgtgaactttgaacaaatcactcacttgtcaatgtatgaaaaacagtcctcttaaagaaatcttcacaacaatggcctccattttttactgtatggaatgcagttccaacctaagtctcaactccaccaaacttctacttcgaggtcagcaagaagggtgccatttccttttttgtggtggacgccaccaagttcaagttcgaaaaggaggacaagatctgaactttcttcaagactgtctctcctttctccccaccccaataggaagatcgattatcttatcagattgataggatttctgatccttcaatgaacggaatagttgaaaaaaaattggaagatgaagtgtaaaatatggaggatgggcagttggataaaataaagccatgtggcagcacaatggatattggataaaataaagccatgtggcaattatggcttggctcactgttagccacatcatcttggcttggctcactgttagcacaatggatagttgattcacttaagttggggactaaaactacacactctagaataatgagggaccaacacatcaacatcaacatcaacagcacatttaacccaagttaattagggtcggtggtagatgaatgagggaccaacacgatagaaaaaaaattatgactaaaagcaaaaacatatattattggatatttctcttatattctaacatttttatttgtcattattttgttaaaaatatgccccattatatgtaggaaatattcatctctgttttttctctgtcctcagcatttttgtggcagctgatgaggtttactatgcttcaacttctgagaaatttgagatcgcactcacaaggtaaagagattactgatgctgatatcctaaactgggcaaacaataaagtgaaaagagcaggaagaacttctcaaatggatagtttcaaggtataaaaccacctattgagagttatgtgtgtgtgcttatatagttcttgctactcttaattttacatttatttataacagttatcagtcttaaacatttgtactgctcatattgggagaaaaatcacaggcatctgttatcaatagtactaaaagtaattttattaaggcttttgaatgaagaaaaggacttttcagtgttcatgatgattgctttgatgttggactacaactcattgttgatatttatgtattgtgcttcatcaggataagaatctttctggtggcgttttcttccttgagcttttgagtgcagtggagccaagggttgtcaactggagtcttgttactaaaggggagactggtatgtcaactctgtcattctattgagaaattgtgctggctaaaattctgcttgcaactctttaatttcacattaagcattattatatttgacaattgacattaatatgatgagaatatgttatcttatgagcaacaattgaaatggtcaaatttatgtcatatgaattgcagatgaagataagaagttgaatgcaacatacataatcagtgttgcccgaaaactagggtgttccattttcctgttacctgaggacataattgaggtatgtttgtcgatgttaaacataattttgttggtaattatgccaattgtctatgaaaaggggagtatggacttaattggttgaagtttgtttccaatagatatgcttttataggattagaaattgatgatgtttctgaaatcttaaaattggaatggtacgttttaacaattgatctggtggatataacggagagcttgtcatttattaaacataaataatgtacatggaaaagcatttttcttctattatctaaatatatttgttcattgagcttcctgcccacatacttcactaatcttgcatttatttggctgagaaattttgtgtgactcttggcttattatgcatttaaccttaacaggtcaaccagaagatgatactcattttaactgctagcatcatgtattggagcctgaagaaacctgaagaaaacttcacccctgaagcatcgcctaaagcttcagtagatggtgaaagcgaaacagatgtagttgacgaggtatccaatttagcaattgatgatgcaacttcggagaatgctagctcttcttaagttagtaaggttgaagcaaaccatactcaatggagaatgagcggggaaaacacatttttgtttatagggcaaaaggaagatgtcaacctcttggttcccagttcgaaagaaagcttattgttatgagaaaccacagataatagaaggatcttgtaaattctttagaatttttttgtatttaggcatattctttgatgaaaattgcatgcaaaatttcccaataataatgtgggaggaagacatcgttttattttccgtctgattgttaagattattcttaatgcgtgcatacagatacgggttgaagtataatacatgtagttgatgctatggcaattggagatcttcatgccaacttttttgttttccgcgaaatgcagatttattcttggtttcttttcttaacttggttgtcagtacagcagaatagtaaaattatacatccactcgcataaaacaacgcaacaacaatagcaaagcattttcttgctagttggagttaactatgtagcgtaatgttttgttaatcatgtttataaacaaattattgaccacaccttttaattgttttattttatcatttttcttgatctcatctttagtgattcgactatccttcatttgatttactttcctcattagaacttttacaagtcttattcaaacattcaaataattaaggcaagtttctagtgttctttatgtaataagtgctatcccgactttttattgcctaaaattgacctgtggattacaatttctttcgggtaatacctttttatcaaagataacatctcaagtagttattcatttcatccatctcacttaaatcatttgattgacatctcctatataatatgtttttggatatttttataatcacggtgattacctcaaaactacctgaaaacaagatttttccaaagcaacaatttgttgcttcatatttaccgtcaaatcaaaattgattttgattcatcttacaaccattccaagcacactgttgatgagaaatgttgacacatatcgaacaagtatcatataggaaaaaagtctttaaacatctaaaatcaattgacactttgagagagataaaaagaagaaagaaaaatattgatatcatagataatatgatgtgataagaagagaaaaataagaaaaattaatattattaataaggtatttaatatttaaaaatgttaaaatataaaaattcaaataaggcaaaagagttgtacttgcttcatatatcagtaacagtaattatctaatattattataaaaacacaaatattttacccttttgttgatctttgcaactttcttcgtccgtcattattgagcagaagtactgaaccgatgtagatggttggtccaaacacatcaacatacaaattcacgtttcaagaactgataacaaaataattggaaactcacgtataaacaaaaaaataacaaattaacatatatatatatatatatatatatatatatagtcaaactacactcagaaattaatgccatcatctaaactcatttcatatcattgtaatcaacgttgtcgttagatgaaaagtagtaattaagtccactatatgatttttttattattattacgatcatgctagtgaatattttaaatatatcggttaagaaattaatgaataaaaaggttttattagaaatcattatattaatatgttggtaatattaaatattataatttttttaataaaagattcatttttcattctttaaccagagcattattgaagtagggtttttttttttttgttattgaaactggaaatactggttagcattacttgttatgataattaagacaagaatttaaaaaatcatagcatctttgaagtaggcaatttgattgccccaaagtaaaaaaaaaaaagaaaaagaaaaaagaggggggtgcgggggagaaattgcaccagaacatgagtacatgcctagtgaaagaatgatgcaatggcactgccttgaaatccagctcagctgtcgtgacgcgttaaacagcaaaataaaagttaaaacatacttttaaaaactctaatacacaattcaaatttcaagatacaaaagaagaaagagtttattagttaaaattattatcattgacctttgcgctggtgtttggttgggggattaggcttaccaccaagctgtaactttggcgagatagtaattctattaatatcaacaatataaatagaattacaactaacaatgccacaaattttttaagctatatatgttgaaaataaatactaggaataaatatagtaatatataaataggtcatcacttccaagttttgtggctgttatgcaataaaccaaaaccaaaactgactcatgctttgatattggccagtgatgctctctagcagggttttgctcatcccaagcttcaatccaactaaaaatttattagttaaaaattatcagttaaaaatactttgaaattctcctgtctaataaagtcggcggaaattagttattccgcctcaccgcttacaactcatgaacccatcacaacattttcaattttccttccatgctcaaccaaccatacaccacgtgatcgcatttattcatacacaccttaatacgtcattttgatatttcattaatttcctattcagccttggtaaagcaatagcgatttgatattcgttatgatcttcttcttgtcattgaacttaccaaatggcaaatgcaaatgattcctgtgtaagaaaatgcatttaagttgatgtttccctttcatctttaaccaaacattccaattaaactaatcccttgaatcaagaatacctattaaataaagcacctaagtggcgacttgcaaccaaccaatttaccaatattaagtccattatccattagttgatgtttcaaaattttacaagcacttggcattcttaattttaataattaaacaattaaaattatgagttttgccagaacttcaaaaattcatggtccaaaggcactaagcaagagaatgtaattgaacaggctaaaaatgagttgggcattgaagtaccacagcagtgaattttgatgttgatacacattataacattaaattaataagtttatgatgtgtccatatccaaatttacactttatgacctacaaacatcctgccccgagggagataagaatttacggtaatgcataaattctgcattctgctcgaggcagcagaggacgacatttagagagagcaacgtaccccccnnnnnnnnnnnnnnnnnnnnnnnnnnnnnnnnnnnnnnnnnnnnnnnnnnnnnnnnnnnnnnnnnnnnnnnnnnnnnnnnnnnnnnnnnnnnnnnnnnnnnnnnnnnnnnnnnnnnnnnnnnnnnnnnnnnnnnnnnnnnnnnnnnnnnnnnnnnnnnnnnnnnnnnnnnnnnnnnnnnnnnnnnnnnnnnnnnnnnnnnnnnnnnnnnnnnnnnnnnnnnnnnnnnnnnnnnnnnnnnnnnnnnnnnnnnnnnnnnnnnnnnnnnnnnnnnnnnnnnnnnnnnnnnnnnnnnnnnnnnnnnnnnnnnnnnnnnnnnnnnnnnnnnnnnnnnnnnnnnnnnnnnnnnnnnnnnnnnnnnnnnnnnnnnnnnnnnnncccaaaaaaaaaaaaaaaaacaggacaaaagagcaaaatgctatttgtcctccattctaagggaatttagccgtctgatcctctgatccagctccttcatcacttcaggctcttgcttcttcctttgctttgatatggtatttgttgtcatggaacctatcttatcaaatgccacctgcaaacacaaggaaagtttaattcaacaaatgcatcaaaacttcttttgataacatggaaaggatgatagtgcaaatgacaaagatatgaaatagtgaaagttgtcttactgtcaatagatcatctggatcaaataggtgatgagtggtaatctgcagaatattgattacttcgccaacatgatgggttataactaattcatcttccttcatctgcaattggggcgacaattgttgaaacatcccttccaatgtagcaaactctttctatattttgtgtttatcaaaaaacaagaaagatcaaaaaggctacactagtggtaccttaaagattgccaaggccacgttaaatataaccttagcaccctcatagaagataacatcccacacgcgaagagttgtctgattcatggaagaagtattagtatgtggaacaatttagcatttcaatgaataattcattccagcactactctaacctcagaaggcaggcttttcgaaaagaggcaaaggaaccactcagtggtaacaagggaaacatcaaattccaaagcttccaaatgagtagcaatcctgaatttccatttctacaattttcagaagatactaagaaacaaacatatgatacacagttaacacatcacataaaattaccttggacactttttagtaagtaaatctttaaacactctttgttccacgtggcatccagacaaattgtttgtgtaacagtcgttaaccaggacgttttccaacaagacagcaagcatccaaaatgcatcttcttctgtcttcatgacaagcaacaacaatgctgcaacgtaatttaatccctggagcaatattatagtagagtcaatatttaagaaaatatgttcccaagtatgcatttaatttttttaattttcaagtaaaccacatattattgtcaacttcaatttaactgaagaaacttagtggcgctatattttacctgccttaaaaaatttaaaacatcaaatatagtgtctgaagcaattgagaaaaacaaaatgtaggtagaacataaaaactaatccccgctttagtcacaccatgttgttaattagttagaaaggaagcattcagaggcctgcatgttactaatagaagacagaatatctaattgcagaagaaaaagaatagaagcagagttgattgaatcaaagagtaagccacatcgtctcaaagaaaagacacaaaagatattttcccttcaaatacctaatacaagacataggtaatatcaaatttcaatttaataacaagtcagaacattgtctttcatgtactgagcagggagtcaaaactacaaatgaaaggccagagcaaacccacctgacaatacccaacatcagaatcacggaaagaataggcaacaagaacacgcctgagagcagcatgtccctcgggagtgtccagccatgggtgaccagggaaggttctgggtagatcctgcaaaaatgcttatagaatgattagaagcaaaataaatatatataatgaacaatgtaacatgtagacaagttcaaattattcttgaacaaaaatcaaaaaccaatcaccattttaaggatcacatcaaacaccctgatgtcaaaccatatcaaataccaccccaatttacaatttctttctaatcagcatttactcaaagcttcgttttgcctaacctaaattccgtgcactttcaagaacatataaattatttaaatgggatacgttaatatggctaacagaacctatgattgtaaaggttacaaacaccgggataaaaaatgcttcaactcttagatcttccttaactctccaaatcattcataaataatacgtattgctcattggaagaaaaacaaaaaaaaaaacacccacaatcatccatcaaaatctgcagcaaaattttgtccgaaaatcttttcacaggtcacacaatgtaaagtctagacaaagtaattcctgcatcaaattcatttgaaaatgatccacacacctgcaagcactagtcaaataaagggtgatgcccacaaccacaattatgaaacttgtaatcaaattcaaaagcaaactcaatgtgtgatgatcatgaaaaaaaaaaagggggtgagttgctcacatgatctatctgccgggtagcaggggtgaccttcccttccactgctttggtcaaatcatcataataactgtcaggcacggtggactttttcttggctgcccctgacaaggaaaaccaaatcttaggcctaagaactgggggtatccccttccttatcaacttcttcaaagttattgcattagccagtgctgagaatttcaatgaagatgtgagggcactgccttgccctatggttgtgtgcaaataccaatttgcccctttgctggcctccaatgcccaccaaacccttccctgttgcctcaccttctcccttacctcattcaacacattcacatcatccacattcccttccactgtgaacccataaaggtcttggaatttcacagtcagatttgctcttctggaatggatactgggcctcaaaactgcaacttgggattggtattcaaaggcaaggtctattttgcttttggttccatacattttttcttgtgtcagatcaagaacgaatggaagatagccacaacgaaagggggtttggcgtggcttcggttttcagacaaggttgtcttttgaattggaaaaggaaagaccttgtcagataagaaaacttacccactagtctgaaaccgtgaaatggtccattttgtggacctgggtgcttgagattaggtgaggagaggctgcaaacaaaatgggtgaaacaagatttggtggaacaagggttggattcaaaacttataaaaaaaggggaattttttttaaagaccctttccgaatccccaggaagcttgagactttgatgtattgagctcaaaaaatctcttctgtgagtctaatgaaaacaattaataaatgtgaaatgggggagggaggggtagggggttgaatattcaggtacagagagataatatgagacccaggaaaacaaaagtgccaagaaaatggggaaaaaaagaaatagaaaaagaaaacaggaaaattacagatccttcaagatggatgtaaaatacagagaggaatgatgaggaaaagtgaagtcctgaaatgggtaataagagtgttctaacaaaagaatggactagaaagagagggacaagaataaaacccagaaatttaggggggaaatttgcatggaaagagtgtaaaaacagaacggagaaataggctgatctgagctggtgggtggctttcgctttgctacatacgctcggctttttatgtggtttgatttttcggggactcgtttaaatttcacctttttcatatattaaaaaattaaaagaattagaacgttaaagaagatattcatgatttttattaagttcatgactgtctagtcaatcaattaaactgcataattgattattttatttaatatgttaaatgacttaaatgtactttttaagataatgtcttattcttgaaacttctattttgcataattgcatattctattatttatataaatatttattaaataatttaaaaattaaacatataactctgcataaatattaagagtagctcaattggttgattaagatatgtaaattcttgtaatttttctcatacctatcttgaattcttacatattaaaaaaaactccacttaaattgtttaaatatttcacctccaacctaaaaatatataaaaaaaaatattcagtttaatttttatctattatgaatgttaaaaaattgaatatcaaccaattataaatcttgattttataaatttagaggtagtaatgctaaagttattaaatttattatttatgattcaataataatataaaaataagtatatgataaatgatagtttataattagatgatcttataaacaaaattacattatttatacatatattatttattcaaaagataaatattcttataaataaacaaattaagaaaaaannnnnnnnnnnnnnnnnnnnnnnnnnnnnnnnnnnnnnnnnnnnnnnnnnnnnnnnnnnnnnnnnnnnnnnnnnnnnnnnnnnnnnnnnnnnnnnnnnnnnnnnnnnnnnnnnnnnnnnnnnnnnnnnnnnnnnnnnnnnnnnnnnnnnnnnnnnnnnnnnnnnnnnnnnnnnnnnnnnnnnnnnnnnnnnnnnnnnnnnnnnnnnnnnnnnnnnnnnnnnnnnnnnnnnnnnnnnnnnnnnnnnnnnnnnnnnnnnnnnnnnnnnnnnnnnnnnnnnnnnnnnnnnnnnnnnnnnnnnnnnnnnnnnnnnnnnnnnnnnnnnnnnnnnnnnnnnnnnnnnnnnnnnnnnnnnnnnnnnnnnnnnnnnnnnnnnnnnnnnnnnnnnnnnnnnnnnnnnnnnnnnnnnnnnnnnnnnnnnnnnnnnnnnnnnnnnnnnnnnnnnnnnnnnnnnnnnnnnnnnnnnnnnnnnnnnnnnnnnnnnnnnnnnnnnnnnnnnnnnnnnnnnnnnnnnnnnnnnnnnnnnnnnnnnnnnnnnnnnnnnnnnnnnnnnnnnnnnnnnnnnnnnnnnnnnnnnnnnnnnnnnnnnnnnnnnnnnnnnnnnnnnnnnnnnnnnnnnnnnnnnnnnnnnnnnnnnnnnnnnnnnnnnnnnnnnnnnnnnnnnnnnnnnnnnnnnnnnnnnnnnnnnnnnnnnnnnnnnnnnnnnnnnnnnnnnnnnnnnnnnnnnnnnnnnnnnnnnnnnnnnnnnnnnnnnnnnnnnnnnnnnnnnnnnnnnnnnnnnnnnnnnnnnnnnnnnnnnnnnnnnnnnnnnnnnnnnnnnnnnnnnnnnnnnnnnnnnnnnnnnnnnnnnnnnnnnnnnnnnnnnnnnnnnnnnnnnnnnnnnnnnnnnnnnnnnnnnnnnnnnnnnnnnnnnnnnnnnnnnnnnnnnnnnnnnnnnnnnnnnnnnnnnnnnnnnnnnnnnnnnnnnnnnnnnnnnnnnnnnnnnnnnnnnnnnnnnnnnnnnnnnnnnnnnnnnnnnnnnnnnnnnnnnnnnnnnnnnnnnnnnnnnnnnnnnnnnnnnnnnnnnnnnnnnnnnnnnnnnnnnnnnnnnnnnnnnnnnnnnnnnnnnnnnnnnnnnnnnnnnnnnnnnnnnnnnnnnnnnnnnnnnnnnnnnnnnnnnnnnnnnnnnnnnnnnnnnnnnnnnnnnnnnnnnnnnnnnnnnnnnnnnnnnnnnnnnnnnnnnnnnnnnnnnnnnnnnnnnnnnnnnnnnnnnnnnnnnnnnnnnnnnnnnnnnnnnnnnnnnnnnnnnnnnnnnnnnnnnnnnnnnnnnnnnnnnnnnnnnnnnnnnnnnnnnnnnnnnnnnnnnnnnnnnnnnnnnnnnnnnnnnnnnnnnnnnnnnnnnnnnnnnnnnnnnnnnnnnnnnnnnnnnnnnnnnnnnnnnnnnnnnnnnnnnnnnnnnnnnnnnnnnnnnnnnnnnnnnnnnnnnnnnnnnnnnnnnnnnnnnnnnnnnnnnnnnnnnnnnnnnnnnnnnnnnnnnnnnnnnnnnnnnnnnnnnnnnnnnnnnnnnnnnnnnnnnnnnnnnnnnnnnnnnnnnnnnnnnnnnnnnnnnnnnnnnnnnnnnnnnnnnnnnnnnnnnnnnnnnnnnnnnnnnnnnnnnnnnnnnnnnnnnnnnnnnnnnnnnnnnnnnnnnnnnnnnnnnnnnnnnnnnnnnnnnnnnnnnnnnnnnnnnnnnnnnnnnnnnnnnnnnnnnnnnnnnnnnnnnnnnnnnnnnnnnnnnnnnnnnnnnnnnnnnnnnnnnnnnnnnnnnnnnnnnnnnnnnnnnnnnnnnnnnnnnnnnnnnnnnnnnnnnnnnnnnnnnnnnnnnnnnnnnnnnnnnnnnnnnnnnnnnnnnnnnnnnnnnnnnnnnnnnnnnnnnnnnnnnnnnnnnnnnnnnnnnnnnnnnnnnnnnnnnnnnnnnnnnnnnnnnnnnnnnnnnnnnnnnnnnnnnnnnnnnnnnnnnnnnnnnnnnnnntatttattttatattttaaatttggttaaaaatatttaagatataatataaaaattaataatagaatccatagcatgaaaaaatatgataaattttttattttgcgcatatgagcaccaatcaccaggacttttaaactcataatttttaagacgaagtgaaagtttaataacatgtttggtaacaattttgagttaagcgtaaagaaaatttcccaaaattacttgcattaactactgcatcaatataaaattttccaaacacgcattgggttgttcaaatgaaacttaagtaaacacatatcctaatagttttgacatgaaatttcatcataatttttgttgtgatataatctctctagttacttatgtattttttctgtataaagtacttactatagaattctctttatatatatatatatataataaaaattattatttaattttaatttattattcaaatattagtaaacatgggagattaataattaatttaaagttttcatgagagtaacatttgactttatttactatttaaaaataaccgatgaacttgtccgcaattaggtttacaaagtcaaaatcaacagcaagaagtaatggttcaaatcttcagaatcaaggatggtagtctccgattgcccataacgtgcaagcagagtgttaagaaaattttccaatatttaaatataataataagttgtgtcaaacacttcatgctgatagtcaaataagaaaaataataaaattattttcaccgatatagcaaaacacgagtttaagaatccccaacataagcaaaaatactttttttttatcaataataaactgacataattgtgtaatctacttatgttattgaatgtatatatattttatttcatgtagccataaatactttttattaaagaatgtagcaataaacattaaaaagtattttactgatgtttgaatgaatcttatattatacttctttacggctttacggtttaattttatgaactgtaaatcaaatctgaaacagaatattattacttataataattttatttgatttaagagaattatttttttataaaatatatattatatattagtatgtgcaaaaaaagaaatgataaaattaaaataaattctcatttctcctcatgatgatttttttggcaaaaaagaaatatttaaaaaaataaaaattccggtatatttctcagattttatttctttcttaaaccatactaattagttattggttaattactaaaagtgaaatatagaaaaggagaaaggcgttgttttgttgacatatatttttgcactgatgtcagtatgtcacagtacgtgtgacccacaaaatgattgtttggatttgagcaaaactgtaataatgtggggcttgtttggtaggctcgtcatttcactagcgccaaacggaagaaatcacgtgtggcgttcgtgatatggataagcctctgcaaaagtttcaactttcaaccaacctgtttcattatgataatgttttttttatcggatccaattctatttacatcaccatgtaaagatacttatgatgccagacggagaattcgattgattatgttacatatttttcataaacttatatataaacaaaaataaaattacttaatttgactaatttaagttaaaaataaaattatttttaaaatgtcttttattaacatttattataaaaaataatacagaatcatggaaaatagaattataattagaattaaatgaaatattattttaattataataacattaaatataaaaaatagttaaatttatttatatttaagtccaatataagaaattactttttttttttgtttatatatgagtttagggctcgtgaataattgctatcatttgttagtttgttttacttatattagatgataacataaaaatcatataaatcaaaattaaacttataaatattatctaaaacgtacatatcactgacttttaatgcactttggttaatttttgtgggggaaattaacaattatttaaaactcaatgctgtagttatgttgccattaatactgtttaaacaaaagaagaagaagaaaaaggctattaatcgttttattggtccagtcaatatgaataatttgggggagttaatttgtttattaagaaacgaggcattagatattgcctcagcggttgttcttgtggcatgggccggcttcgtttctacattgggctggaccggccggttgatgtcgacgtgggtcccaaattcttctggaatcgacaaatttaagccgttcttcatcggtccgtcactatttcatttcatccatataacttttaaatatatttataaaatatactaatatatatatatatatatatatatataacagtatactcttaattagcatgaatcaattctcctttttaaaaaaaaaatcatgaatcaatcaattcatgcaggattatttcaatctaagaattcaaattcgatttttaaatatataatttgtaaacaataattataaattttggtccaacaattatatataaatgaatggtcaatgattaaaagttattttttattttttgaataaatgaaaagttagtttgtgatcccgtgattattttaaaaaaatcatgtacatttttcttaaaatcttgattatttaaatacagtctaatagtctatatttgtaaggacaaaacttataaacaagttttgtttttacagttatctaacctaacaagtgtattaatttgtccacgcaaactaaaagacttcacgaagctaaccttcaagtttttaacaccgttannnnnnnnnnnnnnnnnnnnnnnnnnnnnnnnnnnnnnnnnnnnnnnnnnnnnnnnnnnnnnnnnnnnnnnnnnnnnnnnnnnnnnnnnnnnnnnnnnnnnnnnnnnnnnnnnnnnnnnnnnnnnnnnnnnnnnnnnnnnnnnnnnnnnnnnnnnnnnnnnnnnnnnnnnnnnnnnnnnnnnnnnnnnnnnnnnnnnnnnnnnnnnnnnnnnnnnnnnnnnnnnnnnnnnnnnnnnnnnnnnnnnnnnnnnnnnnnnnnnnnnnnnnnnnnnnnnnnnnnnnnnnnnnnnnnnnnnnnnnnnnnnnnnnnnnnnnnnnnnnnnnnnnnnnnnnnnnnnnnnnnnnnnnnnnnnnnnnnnnnnnnnnnnnnnnnnnnnnnnnnnnnnnnnnnnnnnnnnnnnnnnnnnnnnnnnnnnnnnnnnnnnnnnnnnnnnnnnnnnnnnnnnnnnnnnnnnnnnnnnnnnnnnnnnnnnnnnnnnnnnnnnnnnnnnnnnnnnnnnnnnnnnnnnnnnnnnnnnnnnnnnnnnnnnnnnnnnnnnnnnnnnnnnnnnnnnnnnnnnnnnnnnnnnnnnnnnnnnnnnnnnnnnnnnnnnnnnnnnnnnnnnnnnnnnnnnnnnnnnnnnnnnnnnnnnnnnnnnnnnnnnnnnnnnnnnnnnnnnnnnnnnnnnnnnnnnnnnnnnnnnnnnnnnnnnnnnnnnnnnnnnnnnnnnnnnnnnnnnnnnnnnnnnnnnnnnnnnnnnnnnnnnnnnnnnnnnnnnnnnnnnnnnnnnnnnnnnnnnnnnnnnnnnnnnnnnnnnnnnnnnnnnnnnnnnnnnnnnnnnnnnnnnnnnnnnnnnnnnnnnnnnnnnnnnnnnnnnnnnnnnnnnnnnnnnnnnnnnnnnnnnnnnnnnnnnnnnnnnnnnnnnnnnnnnnnnnnnnnnnnnnnnnnnnnnnnnnnnnnnnnnnnnnnnnnnnnnnnnnnnnnnnnnnnnnnnnnnnnnnnnnnnnnnnnnnnnnnnnnnnnnnnnnnnnnnnnnnnnnnnnnnnnnnnnnnnnnnnnnnnnnnnnnnnnnnnnnnnnnnnnnnnnnnnnnnnnnnnnnnnnnnnnnnnnnnnnnnnnnnnnnnnnnnnnnnnnnnnnnnnnnnnnnnnnnnnnnnnnnnnnnnnnnnnnnnnnnnnnnnnnnnnnnnnnnnnnnnnnnnnnnnnnnnnnnnnnnnnnnnnnnnnnnnnnnnnnnnnnnnnnnnnnnnnnnnnnnnnnnnnnnnnnnnnnnnnnnnnnnnnnnnnnnnnnnnnnnnnnnnnnnnnnnnnnnnnnnnnnnnnnnnnnnnnnnnnnnnnnnnnnnnnnnnnnnnnnnnnnnnnnnnnnnnnnnnnnnnnnnnnnnnnnnnnnnnnnnnnnnnnnnnnnnnnnnnnnnnnnnnnnnnnnnnnnnnnnnnnnnnnnnnnnnnnnnnnnnnnnnnnnnnnnnnnnnnnnnnnnnnnnnnnnnnnnnnnnnnnnnnnnnnnnnnnnnnnnnnnnnnnnnnnnnnnnnnnnnnnnnnnnnnnnnnnnnnnnnnnnnnnnnnnnnnnnnnnnnnnnnnnnnnnnnnnnnnnnnnnnnnnnnnnnnnnnnnnnnnnnnnnnnnnnnnnnnnnnnnnnnnnnnnnnnnnnnnnnnnnnnnnnnnnnnnnnnnnnnnnnnnnnnnnnnnnnnnnnnnnnnnnnnnnnnnnnnnnnnnnnnnnnnnnnnnnnnnnnnnnnnnnnnnnnnnnnnnnnnnnnnnnnnnnnnnnnnnnnnnnnnnnnnnnnnnnnnnnnnnnnnnnnnnnnnnnnnnnnnnnnnnnnnnnnnnnnnnnnnnnnnnnnnnnnnnnnnnnnnnnnnnnnnnnnnnnnnnnnnnnnnnnnnnnnnnnnnnnnnnnnnnnnnnnnnnnnnnnnnnnnnnnnnnnnnnnnnnnnnnnnnnnnnnnnnnnnnnnnnnnnnnnnnnnnnnnnnnnnnnnnnnnnnnnnnnnnnnnnnnnnnnnnnnnnnnnnnnnnnnnnnnnnnnnnnnnnnnnnnnnnnnnnnnnnnnnnnnnnnnnnnnnnnnnnnnnnnnnnnnnnnnnnnnnnnnnnnnnnnnnnnnnnnnnnnnnnnnnnnnnnnnnnnnnnnnnnnnnnnnnnnnnnnnnnnnnnnnnnnnnnnnnnnnnnnnnnnnnnnnnnnnnnnnnnnnnnnnnnnnnnnnnnnnnnnnnnnnnnnnnnnnnnnnnnnnnnnnnnnnnnnnnnnnnnnnnnnaacaatttatttaaacaatcatatatatgatatattctctaagaaataatctaatcaatatcattaattacatagaccaaattaattgactattacttaaatacaaaaatatcttacttttgatttttattttttataatataaagtatcaaattaacaaataatacaaattaaaaagaactaaattaatgcttactcttataatatccaaatactgcattattaaagcaaatgttctggtgtgtgtattccaataaagtcccctttagacttttttctcggatcttagatcctttacttgtacactagttatctagtaaagcttaataatattaacaatttctacaacaagaacaatcatatgaagaataggaagaaaagtgtaaaataagataaaatgatgtgataatgagtgatagagaaaaaatgtataaaagttaaagtattgtgagaaaatatagtgaaaataatattattcagatcatatgactttggatgtggtggttatatagtatgtttggtgatgtgtccaatggttttggacgtggatccatgaaataatttttatttatttttaagttactttggagtgaatttggattaaacgtggatcacaaaagctaaaacaatcacgtacatgtacatagtatgattgttatttgttaagattttatttcatattagatttaatttataagttaagtgtaacttaattacgatgtagtgattaaattatcgtttaggttatcttttaaaagaataaaacagaaatttcatataattatttaactaaaaattatattttttatttttgttttgtgattgtcacgaaataaataatataaataaattataataannnnnnnnnnnnnnnnnnnnnnnnnnnnnnnnnnnnnnnnnnnnnnnnnnnnnnnnnnnnnnnnnnnnnnnnnnnnnnnnnnnnnnnnnnnnnnnnnnnnnnnnnnnnnnnnnnnnnnnnnnnnnnnnnnnnnnnnnnnnnnnnnnnnnnnnnnnnnnnnnnnnnnnnnnnnnnnnnnnnnnnnnnnnnnnnnnnnnnnnnnnnnnnnnnnnnnnnnnnnnnnnnnnnnnnnnnnnnnnnnnnnnnnnnnnnnnnnnnnnnnnnnnnnnnnnnnnnnnnnnnnnnnnnnnnnnnnnnnnnnnnnnnnnnnnnnnnnnnnnnnnnnnnnnnnnnnnnnnnnnnnnnnnnnnnnnnnnnnnnnnnnnnnnnnnnnnnnnnnnnnnnnnnnnnnnnnnnnnnnnnnnnnnnnnnnnnnnnnnnnnnnnnnnnnnnnnnnnnnnnnnnnnnnnnnnnnnnnnnnnnnnnnnnnnnnnnnnnnnnnnnnnnnnnnnnnnnnnnnnnnnnnnnnnnnnnnnnnnnnnnnnnnnnnnnnnnnnnnnnnnnnnnnnnnnnnnnnnnnnnnnnnnnnnnnnnnnnnnnnnnnnnnnnnnnnnnnnnnnnnnnnnnnnnnnnnnnnnnnnnnnnnnnnnnnnnnnnnnnnnnnnnnnnnnnnnnnnnnnnnnnnnnnnnnnnnnnnnnnnnnnnnnnnnnnnnnnnnnnnnnnnnnnnnnnnnnnnnnnnnnnnnnnnnnnnnnnnnnnnnnnnnnnnnnnnnnnnnnnnnnnnnnnnnnnnnnnnnnnnnnnnnnnnnnnnnnnnnnnnnnnnnnnnnnnnnnnnnnnnnnnnnnnnnnnnnnnnnnnnnnnnnnnnnnnnnnnnnnnnnnnnnnnnnnnnnnnnnnnnnnnnnnnnnnnnnnnnnnnnnnnnnnnnnnnnnnnnnnnnnnnnnnnnnnnnnnnnnnnnnnnnnnnnnnnnnnnnnnnnnnnnnnnnnnnnnnnnnnnnnnnnnnnnnnnnnnnnnnnnnnnnnnnnnnnnnnnnnnnnnnnnnnnnnnnnnnnnnnnnnnnnnnnnnnnnnnnnnnnnnnnnnnnnnnnnnnnnnnnnnnnnnnnnnnnnnnnnnnnnnnnnnnnnnnnnnnnnnnnnnnnnnnnnnnnnnnnnnnnnnnnnnnnnnnnnnnnnnnnnnnnnnnnnnnnnnnnnnnnnnnnnnnnnnnnnnnnnnnnnnnnnnnnnnnnnnnnnnnnnnnnnnnnnnnnnnnnnnnnnnnnnnnnnnnnnnnnnnnnnnnnnnnnnnnnnnnnnnnnnnnnnnnnnnnnnnnnnnnnnnnnnnnnnnnnnnnnnnnnnnnnnnnnnnnnnnnnnnnnnnnnnnnnnnnnnnnnnnnnnnnnnnnnnnnnnnnnnnnnnnnnnnnnnnnnnnnnnnnnnnnnnnnnnnnnattcgataccattattttttatgtttctgtttatattgaccaaaaactctctttctttttagaataatgatatgtaatttggttgttctgtttatatatttgttcggatactggatacattatgtgtgattttggtgttttaacttgttttaagcaattttttatttatttttaaaataaagtaaatcaagttaaagctttttaatcattaattggggtgtgaaataaatttaagaatttggaacctaaaagctaaaatctgattacattctctctctctctcacactatatatctatagattagattttgagtagaaaatacattttatgtagatttatgtttgtagaaaattgtgctaccatactggtatgattctaaacatttatcaaatgaaacaatttattggtttgaacactaaaacacttgttttcttgttcttctaaaagaggaagcaacccgcctgctgtggcggggcagcttttttttttnnnnnnnnnnnnnnnnnnnnnnnnnnnnnnnnnnnnnnnnnnnnnnnnnnnnnnnnnnnnnnnnnnnnnnnnnnnnnnnnnnnnnnnnnnnnnnnnnnnnnnnnnnnnnnnnnnnnnnnnnnnnnnnnnnnnnnnnnnnnnnnnnnnnnnnnnnnnnnnnnnnnnnnnnnnnnnnnnnnnnnnnnnnnnnnnnnnnnnnnnnnnnnttttttttcacaataagacctggacgattttaaagatttgaatataaacaaattgtaattagatacactgtcgttaatatgggtattaagtcaagggatagtaaaattaaaaaagggtaaaaatcaaactataaaagtttttatatcacaatgaaattgaaaacaagagtacatttgaactattaagaaaatgttagataggataatcatgagaatttcatttaccaacaatggtgtctcctttagactttatgacgtatggagaaaagttgaaaccaagtatttgtaaattgtacgagacaatttctaaatatgtggcagtggtagaacaacattgaggaagcagttatgggagtgaatcagaagcagcaggtaagtgtagaggatgaagaagccttgttgtttgcaatggaactaagtaactaacgggtgcaatgaagaatgaagtgttctataaataatttgcacgacacgcaatgcataccctcgctggcgcgccagtggccacacccttttatgttggcaaggcaataagtacgttagcaaaatgtggaaggggttgaaaaaacggccttatgttgtcaattgatgttgatcgatcattttcactgtcatagattttggctaggtagacagcaaagtagtacttaatttcaagtgcatacgatagtctcagatttactactagtagttacatcttaatttcaagtgcacacctattgccttacgaaatcattaattgctactaactcagttaagctaattaaatggccataaaagcagcaattagcttaatttcaatatcccagatttagatagacttccaagtgcatacgatattcactggttttggtgttggaaaatatatttcattatgataaacggagtttgagatttgttgttttaaactatcaagatttggtcttggaaaatatttttgctttaagatttgttgttatgtttgttattagtttgttagttgtgatatttggatcggatattggtggtttttttcttcttcttatatataactttctcttataaaaattaagaaaaaaaaaaaaagaaacatacgcacacactcaaaataccatttgcttatttctcatttttataaaattatattatattactacaattatatgttttggagcctagtgttctttggttcaagatcatttcgttgcactcgattggattaatggattgtcgtatcttgaaagaggagtgcatgcatattaatttattctaccaatgcagtgaagacgttttctctctaaagatagtgcataacgcgcttcaactcagatatttttctagactctcctttgttatttttttttgtattaagtattattataaaaattgtttgtgtattactaacattttttcttgttgtatatatgctgcatcaaaattcttccttatcactcattttctgtcatcaatatgttgttatagtattccattaatatattttcttttaacacttcaaaatagtataattaaaaaaaattgtatgtctatatataattgtttgattttgatcaaaggcttttaaccgtgagacatatatgtatttacattggtagtttgtgtatcagaacttaaattattaaatccttcatgacataatatcattatttatcataatgaaatctttagtgtcttgtgtttcataatcatatatatgtttttgataatgtgatattgctttaagtttatttgaagtttgannnnnnnnnnnnnnnnnnnnnnnnnnnnnnnnnnnnnnnnnnnnnnnnnnnnnnnnnnnnnnnnnnnnnnnnnnnnnnnnnnnnnnnnnnnnnnnnnnnnnnnnnnnnnnnnnnnnnnnnnnnnnnnnnnnnnnnnnnnnnnnnnnnnnnnnnnnnnnnnnnnnnnnnnnnnnnnnnnnnnnnnnnnnnnnnnnnnnnnnnnnnnnnnnnnnnnnnnnnnnnnnnnnnnnnnnnnnnnnnnnnnnnnnnnnnnnnnnnnnnnnnnnnnnnnnnnnnnnnnnnnnnnnnnnnnnnnnnnnnnnnnnnnnnnnnnnnnnnnnnnnnnnnnnnnnnnnnnnnnnnnnnnnnnnnnnnnnnnnnnnnnnnnnnnnnnnnnnnnnnnnnnnnnnnnnnnnnnnnnnnnnnnnnnnnnnnnnnnnnnnnnnnnnnnnnnnnnnnnnnnnnnnnnnnnnnnnnnnnnnnnnnnnnnnnnnnnnnnnnnnnnnnnnnnnnnnnnnnnnnnnnnnnnnnnnnnnnnnnnnnnnnnnnnnnnnnnnnnnnnnnnnnnnnnnnnnnnnnnnnnnnnnnnnnnnnnnnnnnnnnnnnnnnnnnnnnnnnnnnnnnnnnnnnnnnnnnnnnnnnnnnnnnnnnnnnnnnnnnnnnnnnnnnnnnnnnnnnnnnnnnnnnnnnnnnnnnnnnnnnnnnnnnnnnnnnnnnnnnnnnnnnnnnnnnnnnnnnnnnnnnnnnnnnnnnnnnnnnnnnnnnnnnnnnnnnnnnnnnnnnnnnnnnnnnnnnnnnnnnnnnnnnnnnnnnnnnnnnnnnnnnnnnnnnnnnnnnnnnnnnnnnnnnnnnnnnnnnnnnnnnnnnnnnnnnnnnnnnnnnnnnnnnnnnnnnnnnnnnnnnnnnnnnnnnnnnnnnnnnnnnnnnnnnnnnnnnnnnnnnnnnnnnnnnnnnnnnnnnnnnnnnnnnnnnnnnnnnnnnnnnnnnnnnnnnnnnnnnnnnnnnnnnnnnnnnnnnnnnnntcaattttttttttttttgttttttcaatcagtttgatattgctcaccaattcataaattatgttatgtttatatagttaaatggattatagaattgaaggtgataactttattgatgcataaattttattatgctttttaaacatattattatagttcttatgtactaatcaatgagtacatattattatgccgagttctaattttccattgtttttgttcaaactacaatttccatctttctctcaactcgatcttgaacctctctcaggttcaatctcactttcatcgatctctcaccctctctcgggttctttcattgtgtttcaatttaagcagcataaaaactttaaatactttcagtatctttttatgttaattttgtactactaattttatacggtgtattgtagacgtgttgtgtgatgatgattttagaatttattgtatccccatattcaagttgtattctattgcatttgtgtttgtcaggaataaggggcctattactgaagtgtattccagaggaaataagaagataacaaacccaactggttcacaagtcaattaattttgcgtttacatgggtcagctaggtagttaagagttaattgctataaatagtaatttataaaaactactcactgtttatgaggtagttgcagggtataatggcttttagtctgataaacttttcttaatttctgcttgtcaaaaggactaaagggttcttcataaacttttttgcatcattccttttcatgaggactagctcctatatagttatttctttaccttacaactgaaagtgagaaggggttgcacacacacgcagatagtgttttaagccaattcccatgtagccaaagtttccttacctagaaaagtatacctggtttttctgttcactggttttcctgtgggttgtgacagtggagaactgaaaactgttcatgtatatgaactaattatattagggactgacttacataatgttgtaatcagaactaatatttactcaatgcaggttcttttaaactatcaagattactcaatcattaaacttatattgctatctgagatatcaaatagtattattcacttttttttcttctgaaaactttgttttcttctgttcaggtgtttctaaaccaaaaggaggagttccagtggcaaaagctttcacagttctttgactaaagtatattggtcaagtaaaatatcatttgaaggagcaatttaattaaggttagtaagtgtcggtaagataaatcaagcaaatttatacttcaacataaagcaaattttcaccgcctaaaaaaaatgcaaccgcctcactagatgaatgaagaagtcactgaattgaattgtccaagatacggcaattgcggcacctccatagttgcaccatttttcattcttagccatttagtttataatattttattgtattaactttgcctataaaaaggccacccatgtaacattttaaaaatatgcagtgagtgaatgaattagtgagtaaaagttaagctgaatttctctcttcctcctaatgtgtgtgtgcgcgttagataactctctcggtttatattttttccgctgcgtgtgagtctgagttgtgagaatctgtgagattataattttgttagttcattgataacagtaagactaatatgtgactttagattctgagtcattctgaagtttacctgttgaaagtgattataaggtagcacagaatattaatggaggtagtatcagatgaagaagccttattgtttggcatggaactagcgggtgccactgctgtctccatggttctcaagtcagctttggagcttggcatcttagaaactatagccaaggcaggtcctggagcttacctttccccttctcacatagctgctgagatcccaacaataaagaaccctcacgcaccttctatgctggaccgcatgttgcgcctcttggctagctacaacatacttacacactccctccatcaactgcctcatggtaaggctgaaaggcactatggtcttcacccaaaagccaaataccttgtcaacaatgaagatggtgtctctgtggctgcttactttctttgtttctcatggaacaggacaaagtccttaaagacatgtggtattgtgtttcactattcctcaacacttttttttttctttctctctctttctctttttctggcccttttaattttattgtattaggaaagttagagttagaggtatcagttaactcccattaattgatataaaatgttcagttaactcccgttaattgatataaaatgttaggtatgaataattcaataactataatcacctttgcccatatgactaaaacggcatagatagaactcttaggatttttttttgcgattttgccaaaatatttgaagaaagaggccaacaaaattttagccaatgaacttagatgtcaaaggtaacttcactataaagaagagagtttgtatatcacctatatttatatatcatctatttatcataaatttatacgagaatttgtaatacaacaagaaagtttatccaactaagtgaaattgactatataaatcacatgatatctttcaacacgtttaaacaccaaaactttaaatctttcttgataacttgctccaatgtccttcttggtctcctcctgcttttcacaatactaaaatcaatgcaatctacttttttaagtgacatctcttgtgatttttttttacatgtcaaaattatctcaacagattttgtcattttttccttaattggtgctatagtagccttttctcttatatgttctttcgtatataatcttaccattttgtcattttttccttaattggtgctaaagtagccttttctcttatatgttctttcgtatataatcttaccattttgtcattttttccttaattggtgctatactagccttttctcttatatgttctttcgtataatcttacctttaaagaaaagattgtcacctaaaaatgagtatttgtaataatatttatagttttatgtcactataaagtaaagattgtcagcaacataaatcaaatatacttgcaacgaaactttttatagatataattagtggttagtgattagtgaagtcttagatatagagtttaaaggactgtattcttgtaggtaccacttgacagattcagttaaggagggtaggcttccattcaccaatgcttatggaatgactgcctttgaattccatgacacatatcctagattcaacaagcttttcaataagggattgtctgatatctctagcatcacaatgaagaaaattcttgagatctataatggctttgagggtgttggatctgtggttgatgttggcggtgggactggagctattattaatatggttgcctctaagtatcccaccaccaagtgtgttaattttgacttaccccacgtcatcaaagaagctccagcttatacaggtgctttttagttcatatcttacgagtttggattgactctactgactataaaaaatttaaaaaataagctaagctagtttcttacattcattgctgggcctgggatgttaatttgaagtgttgttgggttttcctacttggatgcagacgatgtgggactttttaacaccctcctccacaaatcaattggcactaaacgaacgaagttgtccgacaaatatataagttacaccccgaaaactgtagatgatgtgagattttttaacataggaagcaacgaccttgaacccatcgttttaaaaatcggaataggttgaccaatttggcccaaaagccaaaaaaattgaccaaatgacaagtcttttaactcaaaatatcaatgggaactggtcattttaaaatttcaaattttttttactcaccaagttttgtttaatcaaattaaggtcttataaggtttattgatgcttttattaatattttttttatcttacacaatttataatatggtgtttttatgttaatttaaaattaacctaacttgattttttatgactttgttaatatggtatttcatgtcaactaatattttaatgattggttggatttttaaaagatgagttaaataatttatcacattttttgttgtacgtgatattatagaactaatatgggtgtttggtgcaggtgtggaacatttggtggagacatgtttgtgagtgttccaaaaggtgacgccatttttatgaaggtatgttattaatatgaagatgttcattcgctaatcagtccattttcaagtttttatattgattatatttggaaagagtcaaaccgagttaaaatgttatatttcaataatatcatgacaatacaatttttgtatgtagtgggtatgccatgactggaacgacgagcaatgcttgaaattgttgaagaattgttatgattcccttcctgacgacactggaaaagtaattttggctgaaggcattattccagaaaccccagattctaacttagctgcaaggtgtgagtttcaaatggatgttatcatgttgtgtcatagcccaagtggaaaagagagaacagaaaaagagtacaaggccttggctaaaggagctggattccatggtttccgaatagcatgttgtgttctcaacacacatgttatggaatttcttaaaaaggcttaagttacttacatctgctagttgtattttattttttagacttatttgttggctacagaggtatcatgctatatatccttgtttttttttttttttataatgacaaattaannnnnnnnnnnnnnnnnnnnnnnnnnnnnnnnnnnnnnnnnnnnnnnnnnnnnnnnnnnnnnnnnnnnnnnnnnnnnnnnnnnnnnnnnnnnnnnnnnnnnnnnnnnnnnnnnnnnnnnnnnnnnnnnnnnnnnnnnnnnnnnnnnnnnnnnnnnnnnnnnnnnnnnnnnnnnnnnnnnnnnnnnnnnnnnnnnnnnnnnnnnnnnnnnnnnnnnnnnnnnnnnnnnnnnnnnnnnnnnnnnnnnnnnnnnnnnnnnnnnnnnnnnnnnnnnnnnnnnnnnnnnnnnnnnnnnnnnnnnnnnnnnnnnnnnnnnnnnnnnnnnnnnnnnnnnnnnnnnnnnnnnnnnnnnnnnnnnntcaaattagtctttgactagtaacttttaaaattctaaacttttaaaattaaaaaatatgattaaagttaattttaaaagtttgaaccttaaaatatttttagttactttcaacactttttataaaaaatcttttgggtttaggatttaattttattattattattgtttcttaagcatactttttataaaaaggtgtttcttaaaaataattatttatcatattaaaaatataaaatcgtaaatattttttaaataattacaaatttattatatgcacaaaatttttgaactagaagtgccttaaccataatcgttaacatatcatgattcttttactttctacgtaaataaaaaatgaattttggataacaatataagaaagttatacaccactacattcaactattttttttaccgcatttacacagttaaaaattattattatttgattaaaaaatatctgatctgaatcaaattgcatacgagacgagattctgaactcggcttacgtgtgttagtttgcacttcgcacaagaagacgaggagagttatttgttgtttttgaaacatatcctacgtgtgaacttgttattggttcgatgacttacaccgtccaatcaaaaaccctcacatgagaaaagcggaagttagggcaacgacgccgtttttccagtttcgagtttccagcaaaacacttttaaagtctgaaccaaacacacattgaaattaaaaaccacaactgcgtgtgtcgtgtcgtgttgtgttttttgtttcatctccatctttttcttcaactttccgagaagagaaactcacaaaggtatctatctatcttttgattttgtggatccgtatttttgagacgtgtgttaatttaatcgattgttttgcagatgatgttatcattgaggcatgctttggtgtttgcgttaattggggcgttgtggaacttgcaaagggcagagggtatccgatttgtgatagacagagacgagtgtttctcccatgatgtaaagtacgagggtgacactgttcatgtctcttttgttgttattaaggctgattctccctggcattacggcgacgaaggtgtcgatctcgtggtatgttctttttcactccatctcattctatgttaccgcttttattttcagctttatcactttcaaggggtatcacaattactcaagctattaatattatcatatatattattgacaggaagtttagggaagggaatagaaccatagggtacatgaatacaaagagaaccaacaataattgctttctcttacgcctacctgttggctattggtttagggtttaatattggaacaaaccctcgatttcatctttgaaatactaccctttctcataagtaatccctaatgtaaaaaacctatataagtaatttctcatgtatttgaaatcatgctaattagtcccccaaatattaaaaggcccttcaaattggtctctgaattttactaaaatgcatcacctttgagacaattaaattgatgaatattcaatacttgagggattatttatatagtttttttattattccagagactactctcataatagacaggataacacttgagggacaaaattaatagtttattcttttatattgtgaagctaaagctattatgtagctctctgggccgaagaacctttctgtgctattcttcactataaccatgaaactgttatttgtttctagatcttgggatccgttgttaagcttaaagccttaaaccccattctggaaattttaattcattgaccatgaagcaaaaagtatgtttgtcaaacacctaatgaagccacggttaggagataaccgcactgtgcaaaacagttcacagtttttataggaaaaacgaatgcttgtcaaacacctaatgaagcaaaaagttttatcaatggtttaggagataacttcattgttcaaaacagtagttctttaatttagagaaggatgagtggtcatagagatgttgtgcattatatgtagcaatttacatgtatcaccttttacatttacaattacatataaatggtacttacacaattgttaggaataccctttctttgaaatgctcttttctttctttttccttaatacctacccaatcatatgttggaatctcattacaccacaatgtaagaatttcaggtaaagggaccttctggcgagcaaatacaagattttcgggacaaggccactgagaaattcgattttgtggctcacaaatctggggtccataaattctgcttcaccaacaagtctccttatcatgaaactgttgattttgatgtacatgttggtcacttctcttactttgagcaacatgcaaaagatggtaatgccccttctatgaggtccacttgtatttgctgttttttttttttaaaaaaaaaatgtaaaacactgctcttttaagttacatggaagtctaaaaaatgagagaactttcattgaaactttttgtgactgtctgcagagcatttcacccctttgctggagcagattgggaagttggaggaagctttatacaacatccagtttgaacaacattggttagaggctcagactgaccgccaagcaataggtattatttaaggtttactttgctgtttatcgcacaatttacatttttctgtgcataaaatcttttatacctatcaattatacatattactcgtgttaatgataaaaacccaagtttatgtatgccctcttgttttctattcttgataccatttaatatgaacagatgtcccaacatgtgatcatcctaatttattcagataccataccaaaagagacctccctgttgagaacattgctccctatctctttgacaatgttcactgttcactgttgattatggtgaaatgtccatttactgaacaaatacactaagcatcgtagttgataaaagctacaaactggtttcttccttctattaacacttcttgactgcggatgcaatatcatgttcacttatgtctggaatgcagtgaacgatgcaatgagcaaaagagcagtacacaaggcaatttttgaatcagcagcactgattggggctagtgcgctgcaagtctaccttctgcagcgattgtttgaacgaaagttgggtacctcgagagtttagagctacgaaatgttctgagaatctgtaacagtacaaatgagaatgttattttaaacttttttccgttgtcatcacatggatatttatataactagttgttcaatcctactcataatacatgtggaaatatgttatttaatgttttttatagttgatttctttttccggtaaactaaaaaatgacaggccatttctacgctcccaccatgtcctattcatctttttttcgtttactttacttctgccgtttttttaatcggtaaatgttaattgttaaaatgttagatttgtttttctccttcttttcttatccggtaagtatccaatccaccttcccttcactctattgcagctgcttaagttgttacggctcttgagaaattcatatgcattttgtgagcaagatctctctcagatattgaatgtaagttgcagtggtaacctacattctcgagtcgtgacatatttaacaggaatctcttaactctatcagcggcttctttaccaaacacgtgttttttttttatatataaaaaataccgaaatgtgtacttctcttttaaaaaaaaaaaaggtaaatcgtgttataaaacgtaactttgaacaaaaaaagtcatgttttaaacacgactttgtatattttctaaaatttaatttactaaaatcaacacacgacttattcatttttataatttatacccatttcagtaatttaaaataattgctgctgttgataaaaaatagacctctatcagcatttaagaacttattatagcttaaaaataaacaagataaaaaataggattgaggattggctcataactaagcttaggtatagatggtaacaggaaaaattcacgaagtacaatgcaccggtaaaggaataatttacctcgacaaaggtatgtaaggttgaatcaaattattatgtaaattaaatatcaaattttcaattagggatagatacatatccattttctcactttacagtttacacacttgaatatcaaatccttaaaattaagaataaagtctttggcccaggagagtgactggcatctccttaataacattgcaatcaactttctgtaattatgattttgtttttttccgtgtgactcgagcgagggtcgagagagatgaattagtataaaacagtttatacacaaatatatagtttatacacaaatatcaaactctagtgtacaaagaatatatgatgcaataaatactactgattcccaacaaagcccaagtacgtacactacatatgcagcaaaaccattttttctgcaatgatggatttgaaaaaaacgtaacggaagggccgggattgagcatgaagcaagaagaaggtaattaagttacatccttctctcattcctggcattgttgaagattaccgagaactcccgagtccccaaacttaggtaatgctctacctctacccctctcctgacaaagccatccatcaacaaatattaattaattgcatgcgtacgtacgtacgtaccgccatggttcatcactagctcctaacttctagctgcaagatcgaggaattgaatgatgtcatgtggctttggctccttaactgttagattcttctgatatatatttatatttatattatgtaatgatgtttgttaattgatccttctccttctgatatatattttcagttcccgagggcaaggccaaggaggaagatcgaaaaacacagacaaacacagaggagcaggccaatgtcaatgcctatcaaatttgtgagacatacactttctcttttttcatgctttctttacggctgattttattataagtgaacaaaatattaaataaataaaaatatttattgtataacagatatatatatatatatatatatatataaagagtttaatttttatatgctatcaatcaaatattatgataaaactattttctcgtataaaagtacaatattaaactttttagtcttagttgtttgaaattaattttaaagttttatgttaacaaaatcttaatttagatttattgttccttattaaagttaaataaagggaatattaattattattaataactattaattataaggagaatatgttttcaacgttgattttacatgttagcaaataagaggttaatttcttattttctaaatatttttcaagaaaataacaacaacaacaaagtcttattccattaagtgagattcactgcataaattataatatatcatttgatatggttaaaaatcaaggtttaaaatatctcattatgtgtcaagtctcttttaatgaatttttttaatgtccttttccatcttcctctttcctttgtttttgggnnnnnnnnnnnnnnnnnnnnnnnnnnnnnnnnnnnnnnnnnnnnnnnnnnnnnnnnnnnnnnnnnnnnnnnnnttttgtcaacttttttttagtggatgttatatcaaaacttttcttttataacgtcattttatattctattttgtcttatacagttgaacgtatagttgtatgataaaatttgtctttgagtttgggaggaactttgcgatcacaaataatctccaatattttttttttcatttaagtcatttcgcttgtatcctatgtctgacgtcttcattaatttttttatcatcttgtatgattgattttagatatctaaacttagagacatgtgatatgacatcttcccccaatttaactttcgatccaaaagcttcttatctcactaaaattgcagttgtatgcattctgccttactcctacttaaatgaaaatcctttgttttcaaagtctatctctatagttcaagcttattattaacttcttttcttgattcctcaatcaatactatatcatccgcaaaaaatatgcaattagggataatcttatacatgtccttgataagcacatccaagactaagttaaacaaatgatgacttaaagctgaacattgatataatcctatcccaataaaaaagtacctagtttcacctcttggaattctcacactagtgattacccctttataaatgtcttatataactcaaatatagaaacaaacacttaataaagtatatttaatgttttttttatcaatatctttataataattattaacatatttttnnnnnnnnnnnnnnnnnnnnnnnnnnnnnnnnnnnnnnnnnnnnnnnnnnnnnnnnnnnnnnnnnnnnnnnnnnnnnnnnnnnnnnnnnnnnnnnnnnnnnnnnnnnnnnnnnnnnnnnnnnnnnnnnnnnnnnnnnnnnnnnnnnnnnnnnnnnnnnnnnnnnnnnnnnnnnnnnnnnnnnnnnnnnnnnnnnnnnnnnnnnnnnnnnnnnnnnnnnnnnnnnnnnnnnnnnnnnnnnnnnnnnnnnnnnnnnnnnnnnnnnnnnnnnnnnnnnnnnnnnnnnnnnnnnnnnnnnnnnnnnnnnnnnnnnnnnnnnnnnnnnnnnnnnnnnnnnnnnnnnnnnnnnnnnnnnnnnnnnnnnnnnnnnnnnnnnnnnnnnnnnnnnnnnnnnnnnnnnnnnnnnnnnnnnnnnnnnnnnnnnnnnnnnnnnnnnnnnnnnnnnnnnnnnnnnnnnnnnnnnnnnnnnnnnnnnnnnnnnnnnnnnnnnnnnnnnnnnnnnnnnnnnnnnnnnnnnnnnnnnnnnnnnnnnnnnnnnnnnnnnnnnnnnnnnnnnnnnnnnnnnnnnnnnnnnnnnnnnnnnnnnnnnnnnnnnnnnnnnnnnnnnnnnnnnnnnnnnnnnnnnnnnnnnnnnnnnnnnnnnnnnnnnnnnnnnnnnnnnnnnnnnnnnnnnnnnnnnnntttatcgacaaatttagtatattaattttgttaaaaataccagttgaaacgatttgaacttacgatctctcctgattgtattatccttttatttttcttaatcactggatgagtcttatatatcgtatcacctatcatatttatacctattacttatatactctctcattttcatattttaacttgtaggaaaattaatttcaacagttaaagttgattataacaggtacgtaaattaattttaacagatctaaacatgtcaaattctttgagcgttagttaattaaataagtattaagacactgaaaattgactactaaccataacgtgtaaatgggttaagaatttatccctctctcttttttggtacagatagagaatttatccttctctatgtaacactttaaaatttctcttcttttaaaatccctataatgtgacgacttgatgattgtttatacaaaaaaaagctattcaaggacgttcggttgttagcgtgaaaatgtacttcgaggcaatatagtgtcataataattaacgctcgtaagtttgcccatcagtgagaagctgagtagcgtttattcattagtatccaaaataacaaaaaattgtcgagttttcttttttgtactttttaatcaaaattaaaattttaacttaataatcaataaaaatcgaagtaaactttattcttataaaaaagtaatataaaaaatacgtaaatacaacatgtatttttataaaaaaagaacttaaccgagaatttgtttggttttaaaattcccaacatcttaaagactaatgactgattgatggtattttgtgaaactaaccaaaggccagtgacactatggaatgctcggctctataaacacaacttgagcaaaattgaattcagacaataaaaatgtataaaagttgattgaactttcaaccaaaaaacaagggatagtacataaaagacaaaaaataaatagaggttatggaaatgaataaaatgggggaggtcttaatattattggagtgaattactaaaaggaccaaataattacaacaaacgaaacccaatatatatgatgtatatgtatttgaaatcaaacattatgagtgttgtctggcttggagtggggtggtgaaggtgaagcagctgggggtggagttggcatcccataaacttgtgggttggtttgaacctctctccttcctctggctcttccaaagaagtaacatccaaaaccaagaagtaagcagaagattatgaaaggaagagaaatcaccacaaccatccccatcttctagtttttgagtgaatgaaagatactcagaaatgggagtatttatatcagtattggattctctgtcatcggcttaacgttcaagtttctaacggccacttttctgtccccacccacattagctgtctttattacctcacttcacttttgcctctggctagcttggaattattccttttattctactatttttatttcttgtttttttacattttccttttccattttctcatgcatattgcatgtgcacggtatcgacttactgccactgccactgccactctcatcaaagtttttactattattaattaattaactacaataattttgattagaaaatagtatttgtaatgctattgtttaacatattttatataaagactaaattagaactttggcatctcattttaattttctaagtttaagaattatcactttggtctcctaatttatgtgacctaagtcaacccccatttattagatctatctctgagaaatgtagaagttcatagacaggaagtagcaaaaggttctggaacgtctccatgtctcagtgataaaatctgtaactatttttttgagaaggaattaaatctaagtaaattagattcttattcatttatttttattaatcttttataactatgacaataatgcacttagattcaaatgcaatgatgacatatgtaacttttaaaaatcaaaccgagttttctctaaaagtattaatcccaatacatacttttatgaatatcataatttatcgaacttttaaaatatgtatggttgaacacgatattaatgaacttgtgttttaattttcaaaattgagcgatgatttattttatgaaagttatgttgcaataccctctctattctcgtcactcccgtaattgctatttgtttagtacacagagtaaaaatacaagcaaatactcaggccgtcaggcgtgcttttgttttttcactaagaaaaaataatttctatcacattttaatataatactcttcaacatgtcttaagacacttgatgtcagagcagaaccatagcaacaagtttttcttttaaaaaaaaaatgaggtattaatatattgatttgaatttgtggtatatatttggtgataatcaagaaagtgggcgaggaataattgtaagtatactgtttgaaaacggaaaggaagaaataattcttaagtttctaactgcataacgtagaacgggggaaaagaacaatgcggttgcaagaggataaagtttaaataaatttgatagaaaagcactatggtaaagtacggtagaactaaaaagtcataaattagaaacaaagaatgaccttatttatctaaaattaattttattgtccaccattggttacctcaaaagctcatcaatccttgacaaataattttttgtcaaattttatttaactttcagccaaactccaaattagttaggatcttttttcgctgataaactgaggggttaagacctaaaaaaagctcatcaatccctttcaaaacaaagcagattgaccacaaaaataaagactctgcaaggtattaaaatttacgcttccttgggaaggaaggaatccaaggaagcaacaactaataatatcgtagacatagctcccaggttgctaaccgcaaaagaaaatacaattcacttgaattacattggaggcctcccagacccaagcagctgaccaactagattagtcacctagcaaaaaaaatatataaaaaaaatctgcttagacaataagacaatcaccatttgcagtttcccattatttcaaaatcaaaaaccatattgaagtcaggacttctgtaatccacatatacttaatttgccttggctttcatgaaattatcaagacaccacttaaagtctaaccaggaattttcgaagggagcacacatttaaccaagtactaaaacccaactaagatttcatcctaaaacatctatgtgagaaattatcttaaagcataatattgagtttgatgagagaaaaataaggataactaatagacaactcgaataagtgacagtgatagatccaaaagtaaacttaagcaacatcttacatgccagtattttgaaacacagcggtcaatgcaactattttcacccatatttagctcagactccttgtacctgagaagaaaatgtgataaacagatattatcataacattcacattgagccatcatcaaaataatgcaacagcagataactgagaaataagaaactaatttccaaattgactggactggatgacatttgaagggcatcaaacatgacactttctcaggcagattatgcaatcaaaagagtttccctacctattgtcaacacatttcttgaaacaggtctgggtcatcctgaatggtagaaacaacagaaggttagaaaaatgaattattatggcaccaacaaatctcataaaaaaatgaagtcagattgtacattatacttgtttacaacagcaaacaatatcaaggcaagcaagagcagggaaacctacttgttgaataattcgaccctatattccatctccttttcagccattccaaatatctgctccatgaccacatgaattattgaaacacatccaaaaactaaataatcaaataacaccaagaaaagcaaatttaaacttgaaatcacattggggtatcaaattaaccacatcaaccaccagatcagttttaccaaagttggaggaagagaaaagaatgcctacctgttctttatcaaaggcagtgggcgagatgttggaagccattgtaccctgaaaatcccctaaaaaaataaaatgatgaattcatatcacggaaattttatgaatattcagaactaaaatatacgattgaagattgatgagaggtttttgtgtaacttaataggtattaggttagtaaacaataatgtgtgtgtataatatcaaattctttaaatgaatttttatactattcgataattatatatatcatagtcttctttcattatcttaagttcttgattattttgtacaaaaataattgttgcttagggagatgggatgtgttgaggatattgaagttgtaccatgacacaattggactataagacaacgtcagtaagatgataggctattagaattggaatagtgctgaagggttgagataatttggataagatgaagagcatcaccatgtagattttcattattttctaatagattaaaccaaataagagaacacgaacaactaaacatgtagaatttcttaataacctccaaaaatatcacttggaacaaaatgattgagaagcaaatgagtcatagcagtaatttattgcttgtgtgatccaccatttcacctaacacttttcctttgtatctcccatgcttctcacttgaacacgagagtccaccaatgaagtcccaaatcttcccattatgtgaaatttaggccaatagaaacaatgtgaactgaataggttttcaaaaaaggccatttactaaagttcaggtcagtataccaatatatcctacaacctaatatagaggctaaaatccccaactgacttgaaattgacttggggaaagcattcaactccattctcatagacacaatcttttcaaccttaaatgcttgaaatcctaacaagtttttaagtacatgcagaggtagtaacactgcaagagagagcttagaaagggtgaacatcacaaaatcagcagcacgatggttgaaaactatagaacagaacaaagattttgttgtaacagacaaacattaaaactaaaactcactaacgattcggtcttcaatcccaaaaaactttacgatttgaagaaagcggagctgaggaaagaaggaaaagaatgaggttaggaagcaaaataaaatcgaaagcaaacgaacatgagaaagagaaacgtacaatgggccgagtttaagtgatgaatctcgattcacaacagagagcgagagagagagagagcgcgaaaacgtaagaagctgaggcaagctaggctagggttcataaaagaaatttcataaataggccagctagtattatgggcaaaaattttaaaaaaatacaaattaatttaatatttaacaaaagggggcggtttcagaaatatttaggtaactggggtgatcaaacacgccctgcctaggcgtgtttaagccccttatgcctatttaagcccctgcaaacggtatttgatccattccgccttctgtctaaaaatcgctctgtcttctctctaaagcttgggtattgatatcctctgaagcgaagccctgtcgaattcgaagcgttgctgacaagtaagtcgatttaactgactgtgctttgtatttagtttgttgtattatcaaataagaaaattgtttggatcatacgaacttgttagcgacatatatattaggttagtgactagggttttaggtattgtagtttagtttagggtttagatttatggtgtgttgtgttgacgttttaggatttagggttagtgttaatactgtgattagggtttatggggtgagtagggtttaagtgtgaccgctttatggtttatggtgcgtgtgttgattagggtgtagggtttggtgtcacagctagggtttagggattcagcttaagtgtttatgatttatatggtgatgaggggttaggatagggggaacataactagggtttagggttacgtaatttaggttagtattagggttaacatcgttagtagggtttacggcctgggggacatatctaggtttagggtttagggcatatgtcgtgattagggtttagggttgcaggtacatacgtatggttgatggcttgcagtttaggttaggggtttacattgtcattagggtttattgtgttagggttttgggtgtacatggggattagggtttatgactacgggcacaaagggagggtttgtgggtgttagtttagggtgtaggtcgttggctctgattagggttaagatcttctgttatagacgtcaggctaatggatttagggtttggttaaggtttatgtttagtgttgatactgtgattagggtttatggggtgagtagggtttaagtgttctggctaagggtgtaggtatcggggtacacacctagggtttaagtgttaccgctttatggtttatggtgcgtgtgttgattagggtgtagggtttggtgtcacagctagggtttagggattcagcttaagtgtttatggtttatatggtgatgaggggttaggatagggggaacacaactagggtttaggggatctgtggtagggtttaaggcgtatgtggtggttagggtgtatgggttggcgtgactagacctagggtctaggttgttgtgtaaacaagaccactgctttatgaatttgtgtctttgacaatattgactttatttcaccatttggtgatttattgggagtaactacatctgtagaagtgttaggttgtctactttgtgttaaagcggtatggtttcgggtgtttcataattgacggtttcgggtgtttgtgtgtttttgacgtttatttatgttgattgcaggaaatgagttcaagtgatgcggacgttgttcgtgttaaactttttttcaacggaagaaaaattcaagggggaagaggtgttgtcttcgaaggggagcaaaggatgacacgaatcaaccgaaacacaacattgagtgatctgcatcagaagatacatccaaaattgggtgtggacggaaacacttgtatcacattgctgacggcaagaatatggcagcaagatgaatacatggggtttccaatacaggatgatgaagaattggaaatggccattgaagaatattttaatcaggaacggaagaaatttttagaattgtatgtggattacagtgtagttgaggaagctgttttgcccaggaggtcagttgttttgcccaggagtgcaccatcatatgatggtgcagcatctggtgcaaacatgtctcaggaagattcacatgacccaacttgggttatggatgacgatgaagaagatgatgatgatgaaaatatagcgatggaagatcgtcttcttcaggagaatgccagtgcgtccgataatgatgaagatgttggggtggatgcaaattcattccagcaacacactgatgcggggccgtctgaaatgcggaaccgtgcgggtgtttgaccgagacaatcagaacaaccagttgaaggtaagttacatgacttaaaccctaagtgatttcgtataactgttgttcatgtatatattttgcaaaccaatgcttattattgtgtattgtatttaaaggcggtgcggttgttcctttttggaacgggattccacattacacatatatcgattggaatcacccaagcgaagaatcttcttttagcggctcagcttcaggatcgggttcagtgcagggtccttggcaaataggggacgatttgtatgttgaacaggaattcccatcgaaaaaggaggcacaaattgctgttaagcggaacctaatgagggagcatcaagaagcatttgtggttgagagcaagcctgataagtttgcaatgaagtgtgttgctcacaaggatggttgcccttggagggttagggtgatgaaaccagtgtacggtgagaagtgggtggtttctagatggggtggaaagcacaattgcctcaacgaccgtctatcacaggatcatagacaacttgatgttgatgtcattgcttcacttgtagtcggtatgacctgagaatttttgctttattagaaagaagttaatttgtgttaaggtttgttgttaatctgtatctcactatgtcattttcaggaatgattaaggaggaaccgggcgtgtgcattgcgttggttcaggagaggatcaccaccagctttggatttaaagtttcgtattgtaaggcatggtatgcgaagcagagagccatggcaatgatttatggagattgggaagaatcttacgcatatttgccgaggtggtgcaactacatgcttcgtttttcacctggttctttttttgatattcaaaccaatgattattttgtggcaaatcgactagtccgagggaagcgtgtgtttcagcgcatgttttggactttcagacagtgctgcgaggcttttaaattttgcaaacccgtcattcaaattgatggaactcacttatatggcaagtacaaaggaaaattgctgatcgccacgagtcaggacgggaataatgaatgcgtgccactggcatttgccattgtcgagggggagacgttggaagcttgggaatatttccttgctaacattcgcttccacgtaacccaaatgcaaaatatatacctcatttcagatcggcaccggagcattatatctgcagtgcagaatcatgccggttggcaaccaccctttgcgcatcacgttttctgtcttcgtcatattgccagtaatttcaatcaacgattcaggagtgcaagattgaagaagagcctcatgaccttaggtatgttcaaaattagttgtaatttagtcaggtttaaaaatgtcttacccagctaactttcatgcctttataattgtgcaggttatactccctgtaaggccgaatttgacatagcgtatgaacgattccgcaataccagtcctgaggttgcagaatggattgacaacattcctaaggaaaagtggactcgtgcatatgacgccgaggggagaagatacggccatatgacaacaaatttgtctgaatcagtgaacaaggtgttcaagggagcaaggaacatgcctattactgctttggtgaagcacacatacagtcgattggttgaatactttgtgagaaggggtaagacggccactgcacagatgcagcaatcacaactacattgtaaaaatctggttgatgctatgaggcataatcagaacgttgctacaggccaccatgtacgcagctataatgttgaggaaacgtcgtttgaggtggcagatggctgggacaggtcatattcagttaacctaactgaacgtttttgtcagtgtgggaagtttaaggccttcaaatacccttgtagccatgccgcagctgctgctttatacatccgtcggaatcctttgcaatatgtagatgatgtgttcctcgtatccaacttggttgaggcttattctttaccttggcagcctattggcgatgaacttgccgttccccctagtgaagatccagttatcatccctgacaaggaaatgttgcgtgcgaagggtcgtccaaggtcgaccagaatccgtaacgagatggacgaagtcgaaacgggtcagagagctcgtagatgcggtctgtgcaagcaagttggacatactcgtacggcctgtcccactcggggtggtggtgttgcatgattttgttgttatgtgtgttttatgaatgctttgttaaatgtatttgatttataagacatgttgtgtaacatgtatgatgataatgttttgcttgtgatggacatgaatttgcattttgtcattaactattcatttacccgttcaccgttaattgaatacacctaactgaacacgcctaacagggattatagataatggtttagggtttaggcgctgtggtacatacacttcactaatgacatatacatgaaacaccaatattgagtaattagttttccaattcaagttttgcctcggttgaagcacgttgtgacgataactgctttcgttgtggtgtttcatgattctgttattctgttagtaaatgtatgacgttatgtatgaactaggtttaggtgctcctaaagatgttgttaactggttcaatacataagccctaaatatgttgttaactggttcaatccataaatgagtgttttgtgtgtcactagacaatagacatgcatttattattaatcctaactggttcaaccagagcactaatgagtgttgtttgtgtcactagacaatagacatgcatttattattaattttgttacagctaactgaagacgcctacgaagggtgtgattgaacacgcccaacgaaatatgtcggcgtgcctagacacgcccaacttgggcgcgattcatatttaggcgtgactagacacgcccaacttgggcgcgattcatatttaggcgtgactagacacgcccaacttgggcgcgattacccctatataaggtacacggtcgaacacaagatgcgtcgccccgtaaatttcattttgcataccatggcattcttaggagaaacaagcagccaaagcattggtaactccaaattagcattcatttatccaaatggatatatgcagcacaacgacacgggtgtttgttttcagggtgccactccaatagcgatgcgcgttcctaatgagtgttcgtttcagacgcttcggagtaggattcaccacacccttctactaaccgatggccatttcgtggataacatctaccaccgacaaccgtccctagacgcaggtcagcaatatttttttaattctgtcgcactaacaaacgatgatgatgtttgcagaatgttaaggtgccacgaccaaatgtccaccgctggtcctatagaaatattatgcaccgtaaacagaacagccgatgacataatcaacctacttcagtcgaccatcatccccacacatgatgcaatgttatactacaacggaagttggaacataccacgaagaggcaattttctgggttattcctttactggaacaaacccaatccgatttgaaattccttctgaatgcacgatggaaacactgaaggccgtcgtcaagcaagttgcgcctgttggggttccccctaatggaattcacatgtcacaggtggtaagaaaaatgtttttccgtcatccagcacactcagaattctcagacaccaccattcagtatgacataaaggagttgataagtgatgaagacgtgctgaggatgctagcggaatccaactactggaaacgtcttggtccaattgaaattttagccatttttagcaaaccagaaatcgatatggaataacacatgtacgctacaaatgttgttttcgaattatccttattcattgtaatcgtgtctgttatgtattaatggttttgatggcgtatgttactgttagggtttgcggggttatcgtgatcaaataatatttcgactgagcatggtaaacataaatgtcacaaacatcagtagtttacgaaatacaatccattacaatacaacacaaaaatatacaacagtaattgcgagtaaatcaagctgagggcggtggccactgcaaatgacgtgcctgtcgatcaggttgtacccgtcttcgtggtcgccgagaactgcctgcctcagacggggctggctgtgaagggcctggctgagaagggtccggctcggacgggcctacatacgaagggcctgcatcatacgaagggcctgcataagaagggcctgcctgataagggtccggctgagacgggcctgcataagaagggcctgcatcataacaaggggcataggctccactataatccatgttgaagagcatctcgtcgaactctgcctgactccactgggtgtccgtgtccattccaacacggatcccgccatctacatctgcacatatcattgcagtcgtaacatgtggggcatgggtctgcgatgggcctggtgtaggcatctgggcttcggtactgaaatcggcgtagtccatgcccccatggcccccctgcgcagtagcctcgtaatatacgggctgtgtcccatatgtcgatgcaatagaaggaggcctaaagtaacccgtcgtgcgtggcctcggtcgaacaatgggctcaggaacctgctgcaccggtctccgccgacgctctagcccacgaccctcttttctgcgtcgggtaactgcaactgcaatctctgggtcgggctgaagctgcgattcgggagcaaatgggcctgcttcctccacgcgacagctctcggcaaagacagatatcaaccgaccgagctcgtcactcgcccatccgaagtcgaaggcctccttatcggggctaatcatcgcgaagtacagagactccatcccatcggcctacaatttttaaggtatattcatattagctagcatgtcatgtagcataattaatttaaatagacaaatgaggatgtaaagaaaacttacaccacgaccggccttcgcgcccttcttcgtgatgaaccgcttcccgtgttctctgaaccaaaccatgtactcatggtgtggtgacagcaacccctgaatcaagggggggagctcaatgtgctggtccctaacctcccatcgggaaataaatggtctgagtttacgaacccagttgtcttctcgtttcccccggagcgacagatcatgcacacccttcagcttcctgggagcgcgtgggattggctgatccctcccgaattgacgcatgcatctatccggctgagcatattctactgtgtggaagcatatgataggcgtagtagccatccacagaagtcgctcatgctcagaagcaccaagaaagtggtagtccccgtatggttgccaaacgacctgcacacaacaaaataacactttattagttcacagcatgttccacatatgcacacgtaaagtaattgaaaaactactgtatgtacctcatatcgagtcagggagtccaatgccattctatacacgagcagttcatgcggtttaagtcgatctaatgcgttaaacctaatttcaaaataagtaatgttagtatagtataacacttcattgtgactattgcaaacaagaacaacatataaccacacataccgatgtccaaaatgccaatccggctgtgtaggcagcggaatagctggagcaataggtgggaatctcagccacgcccacacctgaagaagcatatgacacccaccgatgtcactcctgtctggatctgtacattcacacatttgtctgaacaaatgtgaaaggacggctgagccccagctatattcaccgatgtccacaaaatcacctgcaagcaacgacaggtatcgtgctgcaatcatgctacctccagatcagtcgcatagcagccatgatccgataagtcgtgcgatgtgggccttcgtgaaccgcgtcacgtggacaatgtcagggaccacctcaccccaatgcgcaaaatgtctatcaaagtacgacaggcgcaaatatccacctttcatctcgttctcctcgtcaggttcctgaccaaacacctcctcaatgacggtcgcccactcgtcaaccgtcactccggtaaccaccttgccatccgtgggcaatcccagaataccggccacgtcttgcaacgtgatggtcatctcaccctgtggcatatggaaggtgtgagtctctggcctccatcgttcaaccagagcactaatgagcggagcatccatctgaaatacataaaaattattaaacaacttaatttatcaaattaaccaatcttaactcgtttcatagttgcatcgctgcatacctgaatatgtcgcatgcgtgcgacatgaagaaacccagcatggcgcaacatgtcagcaacaacctcgggtatatcatcagcatctggtccaccgctcaccttaccacgtcgagtcttcaatacccgaggtggcacgccaccgttccacacaacttgtgaaacgtgcgtgcgctgaatacgcctacgcagcgtaccccacttgtatggggtagggacaacgtaggcagtgggatccatgggctcagcctcatggtcggatgcagatcgcgatgatgatgtggaggatgaatcagccatctattcagtatcttcatgcacaaaaatttaaaatcacggtaaacaaaatattgacgattaccaaatcattcgaacaaaattttcatatgcatcaaatacattaaaccaaatacacgaacacaacatcagcccgaaagctgagccgacacccataaaccctaagtctatagccacatgaaaatattagtgatgtgtatgtaaccctgcaccctaggttattcactgccataaaccctaaaccgggatccataacccctaagtctgaaaccaaacaactaaaccctactcacaacatggacctaaccctaaaccataatttatcatccataggtctgtaacccaagcactatacattaatcacaacattagacctagatcggaatccataaaccctaagtttgtaaccgacgacctaaacactaatcacaacatcagacctgacctaaaccctaaaccgaattccataaacccaacgtatgtaacccaagccctaatctctcgtcacaccatcaaccctaaacctaaactggaatccatacaccctgggtctgtaaaccctaaatcctaggtctgttcctaacgccataaaacctaatcacaatgtaaacccctaacctaaactgaaatcaatcaacactacgtctgtccctgaagacctaaaccctaatcaccacattacacctaaaccctaacacggcacccacaaaccctagctctgttccccaacccagaaaccctaatcaccatgtcaaccataaacccaaaacccattttacataaaccataatcactacatcnnnnnnnnnnnnnnnnnnnnnnnnnnnnnnnnnnnnnnnnnnnnnnnnnnnnnnnnnnnnnnnnnnnnnnnnnnnnnnnnnnnnnnnnnnnnnnnnnnnnnnnnnnnnnnnnnnnnnnnnnnnnnnnnnnnnnnnnnnnnnnnnnnnnnnnnnnnnnnnnnnnnnnnnnnnnnnnnnnnnnnnnnnnnnnnnnnnnnnnnnnnnnnnnnnnnnnnnnnnnnnnnnnnnnnnnnnnnnnnnnnnnnnnnnnnnnnnnnnnnnnnnnnnnnnnnnnnnnnnnnnnnnnnnnnnnnnnnnnnnnnnnnnnnnnnnnnnnnnnnnnnnnnnnnnnnnnnnnnnnnnnnnnnnnnnnnnnnnnnnnnnnnnnnnnnnnnnnnnnnnnnnnnnnnnnnnnnnnnnnnnnnnnnnnnnnnnnnnnnnnnnnnnnnnnnnnnnnnnnnnnnnnnnnnnnnnnnnnnnnnnnnnnnnnnnnnnnnnnnnnnnnnnnnnnnnnnnnnnnnnnnnnnnnnnnnnnnnnnnnnnnnnnnnnnnnnnnnnnnnnnnnnnnnnnnnnnnnnnnnnnnnnnnnnnnnnnnnnnnnnnnnnnnnnnnnnnnnnnnnnnnnnnnnnnnnnnnnnnnnnnnnnnnnnnnnnnnnnnnnnnnnnnnnnnnnnnnnnnnnnnnnnnnnnnnnnnnnnnnnnnnnnnnnnnnnnnnnnnnnnnnnnnnnnnnnnnnnnnnnnnnnnnnnnnnnnnnnnnnnnnnnnnnnnnnnnnnnnnnnnnnnnnnnnnnnnnnnnnnnnnnnnnnnnnnnnnnnnnnnnnnnnnnnnnnnnnnnnnnnnnnnnnnnnnnnnnnnnnnnnnnnnnnnnnnnnnnnnnnnnnnnnnnnnnnnnnnnnnnnnnnnnnnnnnnnnnnnnnnnnnnnnnnnnnnnnnnnnnnnnnnnnnnnnnnnnnnnnnnnnnnnnnnnnnnnnnnnnnnnnnnnnnnnnnnnnnnnnnnnnnnnnnnnnnnnnnnnnnnnnnnnnnnnnnnnnnnnnnnnnnnnnnnnnnnnnnnnnnnnnnnnnnnnnnnnnnnnnnnnnnnnnnnnnnnnnnnnnnnnnnnnnnnnnnnnnnnnnnnnnnnnnnnnnnnnnnnnnnnnnnnnnnnnnnnnnnnnnnnnnnnnnnnnnnnnnnnnnnnnnnnnnnnnnnnnnnnnnnnnnnnnnnnnnnnnnnnnnnnnnnnnnnnnnnnnnnnnnnnnnnnnnnnnnnnnnnnnnnnnnnnnnnnnnnnnnnnnnnnnnnnnnnnnnnnnnnnnnnnnnnnnnnnnnnnnnnnnnnnnnnttacgattttatatatttacgtatttggttggataaccatcttttattcctccttcattttagttatcaaaactaaatattcgtcgttcacttgaccactaatcttccaaactaaaaatcttttaccaaatggagtagaaagtatgcgctaacattactcttttatataagtaactggaagaaaaataaaggcaataagaataagtagaatagattctatctaaagctagcattaattatcaagatcttattaattcgaataaaattaaacttgatctcaaatttaaattttatatatgaaaaaaatataattaaaaaactctaatagaaataattagtcaaattttttaatagatatttatcattgataaatattttacttcaataacaataataacccaaaaacttaatcttaggaacaaaaaaaaaaatatcttggaatgcttagtcaatcctactgcgtgttgtgaatctttttaaccaaccccctaagaaagagaaaatactacttgcttggcgtgcgagaatattcagaataaaatgttagatctaaattagcagacgcaagaccaactacaacttcattatttccactctttttggcaatttcagttctggaacacattttgcaaaccacgggaatctgtaatcttgtgcttggaataacaggttttataatgattcattccaaaccaaagtaccccaataaaatttcggtgaaaactaaaatttggataatattgtttcatgttctactttgatgctaagaaaatttcactttcacaatatgcgacttaaacctaacaactatgtagctaaatttctctctcgttcggtcttgtccttgtaataaatttgaaacttgcaggttcgcttgctaaagagggaggcaagatcttttgagctttgcagcaaacgctggctcttaaaagtacatctacggaacatgaaataggtcttacagaagctcaacaacaagggcagatgctccacctcctccattgcaaatgccaccaactccgtacttcccattcttctgcttcagtacctgcaggtgatgacttttagattaactgaatcgaaaaagaacaccttcaatattggggaaagatccatacatagttagtcaaaatcataaacaacaacaacaaagccttatcccaacaacaacttatagtcagaattataagttacttaaaatatcagatgatcactttaaaaatcttattattttgtgttgtaataccattcatataagatcaaatgatcaagatttgttcatttcactctcacaacaaactactctcaatgtaatttattaaaaaaaaaggggacaaaataataaaattattccattatctttttgaataattgaacataacgaatttaaataattaaacaaagaatttaagagatgagcactatgatagacttttttctacaaacacaaggcaatctgtcaacatgcatgctactatatattataaaaaaatcaaagttatgaactgagcacatacccccaaaagtgtcaccagaatgcgagcaccactgcaaccaagaggatgacccagtgcaacagctccaccatgtacgtttactttttcctgcaaaataatagttacttgagtaaaagaaataaatggaggggtgcatccattaatggtcacaatgaagttaaattatggattatagacaaattttaacatgttctgcactgtgcaaagaggggttctggacttacaacagcatgcactcttcaagacggtcaactggaaatagtttattatacatgcactaaaggattacaactttcgcacagtgacaagaggaaaaactaaccgagttaagtccaagaagtttctgatttgcaagagccacaacctacagacagcaatatgaagaattaaaattcaccgcatcatgagttgaaaaattactagtttactaccattgaaactttgacatgaaatcctaccgcaaaggcttcattaatttcataaaaatcaatttgtgaagtctccaaccccgccttggcaatagctttgggaatggcaagggatggagccgttgtaaataactctggttcctgcacagctcaacctcatatgagtatgaaattatactaaataacatatcaaacaccagaaataatgtgaatgccaaaatggtttttctatttcttattttttatagtctgaagatgtggttcatatttaaaatatattttacgtacctgagcagcatcagcatatccagtgatttttgcaataacttgaagcccaagcttcagtgccttctctccactcaccaaaactagtgcagcagcaccatcactgttagcaagagaattttcattttattaaaaaccagggctaatcactaatgtcaaactaaaaattacaaaaaaaaaaaaaagagagtagatatatgtcagttaatagcatttgagcgtttaagacacacatattggagatgtatatattgaaaattccattttatataagaataagatgaacaaatttggaccatacaaccatacatgaatggtcaatattaaaagttttttaaggtcacacgaccaattaaaaaagtcatttgactccctatatatatatatatatatatatatatatatatagtattttataacaataaataattgacaagggcatccaaatacaaaatcgttatgtaggaaaaagtttaacaaatttcgataatatattaaccttatgctggaagcattgccagccgtaacagaacctccagtctccttgaaacttggccgaagtttgcgtaacttggcagcatcaaactggcataggaaaaggaaaaatttaacaatatatttatttgtattcaactgaaagtatagacaaaattaatgactatagtaacaataattgcagctagaagtaacatacatataaatgttgttaatgtgaagaaaaaatcataaattccaatcccaactcttgattaattatcaccttatagtcttctaacaaatttaaagactcatgaattattgggtaaacatgtgttttcgtaggctcaccatatttatacaagaacaagtattaccatggttcaagttatttatatggttacctttcctaggccttcatccttatcaacaactgttgatggtcttccccttccgccagagacttcaactggagcaatttcccatgaaaaggcaccactttcttgggcagcaattccacgttcaaaactctgaattgcatagttatcctgagggtaaaacagagacatcaacaaaaaattgattacaatggtcctgccgaaacctttctgaacagaaattaatcctaaaatacctggtcgtctcttgttaatgcatggttatctgcacaaagctcagcacacactcccatgccaacatccttatagacatcccacaaaccatctttcaacatcccatcaacaagtgaatcatgtccaaggcgtgatcctttcctgaacttttagtattgaatcagtttatttcaacacaagaactaatcttaaggagagtgtcgaattaaaggcaatattgaccttgcttcagccaggtacttgggtacgttagacatgctttccataccaccagccacaacaacatcatttgtgcctaattgaatactctgtgcagcaagcattgcagctgcaataaccagaacaaggttaatatcctttttctgtatttttaaacaaaaatacaaagaaacaaatagaatttttttattataaacacacctttcattcctgatgcacaaactttgttaacggtagtgcagataactgaattggatattcctgctccaagagcagcttgtcttgcaggagcttgccccaaattagcactaagaacattcccaaaaaatacttcttccacaagggatggatcaacattggcccttttaagagcagctacagatgaacgaaaaatatgtaaacacaaataagtttcaaatggaatgtaataagcactgacataggcttccatagttaccttcaatagctatagagcctagcttggtggcagatagagatgacagagtaccaagaaatccacccattggtgtacgtgcaacaccaacgatgcaaacatctatagaaatcaaaacatatgaagtcaactaaccaaataaagggttatacaaagtaaaactttagaaggtgttaaatgaaccaaagaaagggtgtataaacactctatatctatatgccaaaatgtttgatgaaaaacctcttggcttgattgaatctgaagatgctgcagctactggagccattgatagatgaaaatggaatctgtattccaaaacattaaatacggacaaatttaggtaaaattaacgagctaacatgcaaaatcattgagaactaattccatgtacgatggattatgtgaaacatcagaaattgacctcgtaatataaaatgatacagaaatttaaaaagaaaagaagcagcgcgagattgtaagactgttcctccagcgttgtttataatataatataataaagaaaataataaaattaggaatggtgtcttaattaatccataaagaagcaaataagatggaaggagcggtgaatagaaaagtgaggaagagagaagcaaatatgaaattgatgtggtgcaaagcgaaacgcggatctgataaagtgttgagcaaagaagcttacgagagagagagagagagaagaagtgaacaagtgtcggactgatctgagtgcttatatatggtcagctcaggtgggaggagccacgagttacacgccggcacgcacgcactcaccttttaatgcatccaacatgttgccggccaagccaaaaccatttacaattactcttatagtcttattttcccaactttttcttttctgctcgatgctgaatgattaaatccatttagattcacttttgagataaaagtcatcttctgcaaattgagttggatcatgttttttcttaatcgatgatttcgattggtttataattgatgttagcaaaactaaatcgatctaaacaaaaacgatactctttaatatacatatcttattatatgttccatatatgatttttatatattttaatatgatttttttttagtgtttcaccgttatgtttattatacatttttcatgtatcaaaccaacatagcaaaattatatattatttcattctccttgactttttattttgattttatatatatatgtttttgtttctttagggaaagaaaaaaattatgttgtaagatgattaatcaattgattgacatacattttatgttttttttaaataataatatatgtagtagtaaaatttgaaccatccaatctaattcaaatcatattttattggattggattttctttttaagatactaatttaaatcgaaccaaatcataggtttaaaatatatttttttatcatttttttcttctttttagatcagtttgcaagctttttttattagattggatgcaaatatccctaatttttataatgttattatctaataataaatcaatatgtataataaatatattgacttctannnnnnnnnnnnnnnnnnnnnnnnnnnnnnnnnnnnnnnnnnnnnnnnnnnnnnnnnnnnnnnnnnnnnnnnnnnnnnnnnnnnnnnnnnnnnnnnnnnnnnnnnnnnnnnnnnnnnnnnnnnnnnnnnnnnnnnnnnnnnnnnnnnnnnnnnnnnnnnnnnnnnnnnnnnnnnnnnnnnnnnnnnnnnnnnnnnnnnnnnnnnnnnnnnnnnnnnnnnnnnnnnnnnnnnnnnnnnnnnnnnnnnnnnnnnnnnnnnnnnnnnnnnnnnnnnnnnnnnnnnnnnnnnnnnnnnnnnnnnnnnnnnnnnnnnnnnnnnnnnnnnnnnnnnnnnnnnnnnnnnnnnnnnnnnnnnnnnnnnnnnnnnnnnnnnnnnnnnnnnnnnnnnnnnnnnnnnnnnnnnnnnnnnnnnnnnnnnnnnnnnnnnnncatgcatttattactaatgtataaaattacattactatcatcagtaaaaaataataacttccaaaataattatcataaaaatcaattaatttattatatatgataatttatgattaaataaacaatataaaaacccttttcactaatttttcatagttatttacttcaatttgtttcttttcctttcttcttcttttttatacattttttggcttaggcgactgtataaatttaacgtggattactttatgatgttaccaaaaaaaccaacaaattgttagatagcatgctgattagggtgtgtagaaaagctttgctaagataggtataattcattttgatttttttataaaataaatattttttaatttccggttaaaaaatatcttcatgcacatgaaaaaagtcgattacaatagtgtcttcttaaaaataaattgataattagtttaaggtaattttacatacaacagtgattagtgaattggtcacgtttttggtacagagcactgtggggagcaacggcaaagtggtttggtgtggggtagttgaacagagatgatagttaaatttggggcaaaaatttaaaaataatattatttaattatttaattagcaaaagggggctgtttgggcaatatttgggcatctggggttgccaaacacgccctgcctgggcgtgtttaaacacgccctagctaggcgtgtttaaacacgccctggcagggcgtgtttggccccccagatccctataaatgccccggcaaatggcatttgatccattccgccttctctctaaaaatcggtctgccttctctctaaagcttgggtcttgacatcctctgaagcgaagccctgtcgaatttgaagcgttgctgacaagtaagtcgatttaactgactgtgctttgtatttagtttgttgtattatcaaataagaaaattgtttggatcatacgaacttgttagcgacatatgtattaggttagtgactagggttttaggtattgtagtttagtttagggtttagattcatggtttgttgtgttcacgttttaggatttagggttagtgttaatactgtgattagggtttatggggtgagtagggtttaagtgttctgcctgagggtgtaggtatcggggtacacacctatgggtttaagtgttaccgctttatggtttatggtgcgtgtgttgatttagggtttagggcatatgtcgtgattagggtttagggttgcaggtacatacgtatggttgatggcttgcagtttaggttaggggtttacattgtcatcagggtttattgtgttagggttttgggtgtacatggggattagggtttatgactacgggtacaaagggagggtttgtgggtgttagtttagggtgtaggtcgttggctctgattagggttaagatcttctgttatagacgtcaggctaatggatttagggtttggttaaggtttacgtttagtgttgatactgtgattagggtttatgggnnnnnnnnnntatatatatatttattattccgtagtgttgatatttaaatttcgtttatcaagactgaccctattttgtgttgtgtggttgacacctgtgatgaccccaaattatttgggcgagcagaaaagcagtgatttggatgacgtacgagaagaatgaagattgtgtgttgtttgtctgttttttgatgatctgtatttgtattgtactatggactgtgtatatatgggactctggatatgtaataatgaatggaccgtagggtaggtgtgaacgttatgcgctacataactgaaataacgcataaactcttataatttttaaactcgttcttaaatcaacgaaattttcatttgaaccttcatttctaaatctagtttttgaaatcaaccaagatctgttgaaatttcattctttttgtttttgaaaaatttttagcaaacaaaaataaatacgtaataaaaagcgaagtagaagtggtcgtgacatcctatatatagagctatttaattatagtaactaagccaaaacctttacctaatttcgaaacatatctctttaatacaggaaagaaaatcgatcccacgcgacccgcgcgcgataccgcgctagtcgcgtggaatgacagaaagaatggcgcttatcgcgtgataatggcgctacccgcgcggcttggcagaaagaaacaagctttatctttgaagttctgacgctactagcgtgaattatgacgctactcgcgcaggttggcagaggagaaaacccttaatccttgaggttctgatgcgtctcgcgtgataatggcgctatcagcgtggtactctcaggtcctccacgctggtcgcgtggtttccacgcttgtcgcgtggaatcttccagtgattgttcttcaactctgaacttgacgctactaacgcgggtttggcgcgactcgcgcggctcttcagaatctagcttcttcttttattttctcttgagttcctctttttgacctgcaaatacttaaatagtattgaattgcttaaaataattaaaaatactaaaaagaactactttttgaaagtatttcctaactatttaattaaaatataacctaaaactaagctagaaataagatgtgtttgcaacacatcaaacaattcccagatttgaaagttgctgtccccagcaacagaagaattcaagatttagcaagaatcaataatcaagcacaaaccacagcctacaatcctagaataatcatgctatgtacgatcaattcaaatcaaagctattcttggcactttcaatgctatcaacaatgagagtaacttgagtttttctcacagatttgtatttagtcactcattcactcaagtgtttaaggttataattaccctcttactcaacaacatcacagcactaccataagcttgaagatattctcaacagttgcaattatgacttgatcaaaaggtctttccggcttgtaatgtggctgggctaaaggtaggataaatttttggatagtagtttaatgagaggccagatccattcctttaaatccatactttttgtcttctttttcacaacctggtactttcattcaacatatattctattaaaactgaataatactaaaattctttttgagttttaattaattttttatttttatttttttttatttttattttttttattttaaagtaaacaaaacatatcaatacatagataatgaaaattactgcagcttcacaatttttctgatgggttcattggcctccaatttggttcatgcttattcattcttgtttttcaccatcattggatttatttatgcttcttgatacctgatgaacaatcccttatcatagacttaaatcaacttctctggccccaagggtttggtcatttggatgtagctttctaatttgggttattttgaaatgaaaagcttaggctcaaattaggtgcaattggaaaaatacttgaaggtttagtcaatttggctctagctaaagagaaaaaacttgccttaatcatttcaagtcgtacctgcatccagagaaacaattcaagttctagagtacaatgaaattggagtctctcggaaagaatttaccgtgtttggctcaaaaccttgcaggtgttagtactcaattcccatctcatctgactgcatttcaagcatccatttagctttaacattcatttcacatactaacaatcaaattccagtcatgcattatgcagtccatgttctattttatttcatcaagcttcatccatgaatcctatctatcactaagttcaattacttttaatctgaaaaaatttttgtgtgctgcttatttttaagaaaaattctggttattataaaaattttgcaagagttctgttagacttcatttgtttcttaattgtgatttgcgaaataatgcgtaaccattcccagatttatatgttgctgtccccagcaaccacaaacatggtcatagcgctttggaaaaaatttttgaagcattattcggaaaatagcattcaatccacattggtcgaaacagataaaaaaaaaaaaatatgataaacgataagatgtactatatatcaaatgcagaactataaagtgtatgtaatgtaaatgtaaatgtagaataaaatgtatgtagtgcagaatctaaaataacacaagaacataagtctgaactagaaaataacagtaaaatataaaaggtcctggtcaatctgttgcatctcggtcctctgtaggcataaccacatttgtgtgctcggaattcaacggctgggtgacaactgtgtctgcatcggatgcctagtcgatgggatctgtagctgcgggacctgctggtgtctgtggtggagctggaatctgatactctgaaggatgaatgcccagatgacgacacactgctccccacatacgcgtctgaagctccaactgcgcattctgaaactccagctgagtcctcacaaactgctggaaggcaagtacgctcggtgagtcctcgtatagcggagtgcgcatgggtactgtggaaggaggtggcatcgaagatgatggtggtgctgctggaatgggcgaggctggtggtgtaatggctggctgatcaggctggggatcctcaatagcgggtacatctcgaggtgaaacagctgcgatctcctcaggtgtgagcttagaagctctaaccacctgctcgtccgctgcggtctccatggcagtaaggtaggtcttatagaccatgagtggtgctatcggtacgtccatggcctcgtcctcgtcaatgtggacccccgcgtgccggtagagaagaaggataagggaggagtgacctaaccaggacttactactggcatcctgggtcatatgcaaaatccgatcagataggatggaagagatcagaagattacctgcccctcgtagaatatataagaaaatagctctctctatgtttacatcggtcatgttagtagagggcatgaccgtgtggttcacaaactgatgccagaaagctgcatctcctactaattcggacttctttagcttttctggtatgtaatcgaggccgggcttagacttccaagccgtgtataaaccagtaatagcatggcgaatagtggtggctagctctgggacgtcatcattatacatcttcgttaccgcgtcctgctgcatgtgcatgaataatttgccgaagtcacatgcggagtaggggtcataatcggtgtctcacaggctctctatcgtcctctcgccaaatgggacggtgactcccctcacccaagagcatctggtgcgataaatggtatcatgatccacattcaccaagaactctttcaagatcatgctggagctctgctctgggaaagtcaccaacctctgccactgtcttcgaataatcacttgtcgaatcgggttgtcttcagggaaagtgtcccacataatcttccgctccttaattattttcttgggaagataccaggaatcaaacttttcctggcagtcagcagtccggaagcggagttcgtcaaaatctgaaattctagcccgcttcttgctactttctccagtagctttcttctttcctttaactactgatttggctttttcaatctgtttaccctgaacatcagaaaaagttcaaacatgtatatatttttattaaacatttgaggattcccagatttgtttccttaatggaagtaattcaatcaagcacacagaagttgcagaatcataaagaataatagtggtttaattccagcacttaatcaaataatcccggttctaacccaacagaccaatcatgactatggacaacaattcccagattttatacccttggtggtctcattagcataaagcaaagcatttcacaattaacatatttcaattcaacagggtatagaaagcaacagcaccatgtacttcaacgtggttaagattccaaatttttatagcaatacagtcaaaggcaagcaaagatattgagtctttcattgtattccgcttatattaagcaaacagaattataataagttcagaatctaagcaagcatgtctcaggaattcaagcaatatatattgataagtaatggttaatgattcccagatgaaagttcttagtcatgtttcatccaatatcaacaatgtatattttcagcagtccactaatattccacctcaatctttatcattatactttcaattatggaattagcctatgcaggtttaaatttttaaaacttcatattcatattaggctaatatcctgtctttcgaacaaagacaacattatagtgcaataacccaatggtcaggatatagtcataacaaaagcacagagcattaatttataaagcaaataatgtttcaagtatttctcatttatcacacaggaaacgatttcatgtttggttaggcacaaagtgaatcaattttgattcctgttttgggtgaagcttcagtaacttccacaattcccagatttttctttggttacccccattacacttaaaacaatgcaatactatccatatcagacttattagactcaattgatactatccataagaattcaaaacaatctgaattgataccatatagaacaataatagcatttctaatttgaggttaaagcactaaaccccattcattcaattgttatagctatggttagtgcattataattacaattcagatgtgtgcattaaatcaatatgacaagcctaagacatcaaatcatcaattccagaacatgtctaatggtaaacaatggtattcccagcatagcattttagttattcctcattttggttctaatttcattcaattctcattcaggcattttatcgaatatatagcaggcaagattctaaatcagtattgtatttctatttggaaccatcaaaaaccccaaaatttgaaaaaccaacagagcacagacaagagataggagaattgagcaattatatttatgaaagctcaaaatgtggctaaacctagggtcctcacaggtgttgtcataattggaatgtgagaacttgagcactaatcattgtgttcctatgaatgccattatttaatgtaaagtaatttaagattagacataccttttcccttgccattgttcaattcgaatgtagtgaatgcagtgaagtgcagagaagtactatgaggctaagtgtgagagaggaatgaaaatgatagtgtgggatactgataatgtgatccttttaaagagggaatgagattgagagagctgagaggaagtttatggaggttgaggaagtttggggaagtttgagtaggttaggcgagagagacggataggatttggggagagtgagagtgaaaggcgcgatttagaaatttaaattaaaaactgtatccgcgaactcgcgcgggtagcgcgataaatggcgcttgtcgcgtcatgctccagtgcaagctcaattggtttctggttcatcgcgcgattcgcgcgggtttcaagttagccgcgtgagttggtcgtttcagtttcaatttctctctgtcgctacacgcgaccagcgctatattcacgctattagcgtgaaatgccttggaaggtctgctggaattccatgcatgacgcgattagcgtcctttctcgcgctagtcgcgtggaatagtgcttgtgggtactgccatttggcgcgactagcgttatatccacgctattagcgtggaatcgtgcagatattaaatgcttttagagcagacgacgtgactcacgtggcatccccgcgactagcgtggtagagcagtatgtttggcgcgagaagcgcggaatgtggcacgactcgcgtggattcctttgacaggctttctgagtttttcttcctgctctcaattttcttagcctaacatctaaattacctaattacttctacatgaaatagataaaactaatactaagtgatcctacttatttaaatttcaacaaaacttagtaataacaataatgtatgaattaaaataatgcagaatcgcaaactactgctagcaacttaaattggaaactatatacatgagacggtgcttgtttaatgtcttaagctagacacttactgcaatttattcatcattagctttgagtggtacagaacttgaatttctgtccaccttacctccaaagtaatgtttcagcctataaccatttaccttaaatgctttatcattgtccaaggctgaaattgccactgttccataaggaaaaacttcccttaccaaaaatggtccagaccatctcgatttcaatttacccggaaaaagtttcagtcgggagttatagagtagcacttgttggcctggaacaaactccttaggtctgatgtggttgtcatgccatttttttgttttctctttgtaaataagagcattctcataagcgttcaacctgaactcatctaattcattcaattgaagcaaccgtctgtcattagctttggttagttcaaaatttaaaaacttagttgcccacattgctttatgttcaagttcaagaggtaaatgacaagccttaccatagaggagttggaaaggagacataccaattggggtcttaaatgcagttctgtatgcccacaaagcatcatccaatttcttggaccaatcgttccttgatgatccaaccgttttctccaggattcgctttaattctcggttggagatctccacttgaccacttgtttgaggatggtatggagttgctactttgtgcttgactccatatttagccaacaagctctcaagttgcttgttgcagaaatgagttccaccatcacttattattgctctaggcactccaaatcttgtaaatatgttttttcttaaaaatgagatgactactttggcgtcatttgtaggtaatgcagttgcctcaacccacttggaaacgtaatccacagcaaccaagatatattgattagcaaaagatttagggaagggtcccataaagtcaataccccatacatcaaataattcaacctcttgtatgttgttcaagggcatctcatctcggcgagatacatttccagtccgttggcagttatcacattgcatcacaaagtcttttgcatccttgaatattgttggccaataatagccacattgtaggatcttctgtgcagttcgattaacaccaaagtgtcctccgtaattggatgaatgacaatgccatagaatggttggcacttcggtttcagctacacatctgcggataacattgtcagcacattgaaaatataagtacggattatcccacagatacctctttgagtcatgcagaaacttctttctctgctgccatgtgaatgtctcaggtataactctagcagctttataatttgccatgctagcaaaccatggaatagtgttcacagcaagcacttgttcatccggaaaggattcattaatctccacttccggtccatcttgcaattccttatgctgaattctcgacaaatggtctgcaaccttgttttctaccccaactttgtctataatttcaagatcaaattcctgcaaaagcaacatccaacgcaacaaacggggttttgcatcttgtttatgcagcaaaaatttaagggctgcatggtcagtgtaaataatgactttagaacctactaagtatgatctaaacttatcaagtgcatacacaacagctaacatctctttctcagttgttgcataattagtttgtgcctcattaaggattttgctagcataatagattacatgcaatcgtttttctttccgctgccccaaaacagcacctactgcataatcactagcatcacacatcaattcaaagggtaaactccaatccggagcaattaaaacaggtgcagtggtgagcttttgtttcaacgtgttaaatgcttcaaggcaagcttcatcaaaggtgaattcaatgtctttttccagtagttggcttaatggttttgcgatcttggagaaatccttgatgaatcttctgtaaaaacctgcatgtcctaaaaaactgcgaacaccactcacattaataggaggaggtaatttctcaattaataaaagcttagctctatctacctctattcccatttcagagattttatgtccaagtactatgccttcccttaccatgaaatggcatttttcccagtttaacaccaagttcgtttcttgacatcttctcaacacataggttaaattagttaaacatgaattaaagcaagagccaaaaacagtaaaatcgtccatgaatacctcaagactcttttctaccatgtctgaaaagattgcaagcatgcatctttgaaaagtagctagtgcgttacataacccaaaaggcattcttctataagcgaacaccctgaacggacaagtgaaaacggtcttttcttgatcttccggagcaactgggatttggttatacccagaatatccgtcaagaaaacaataataatcttgaccggcgagtctctcaagcatttggtccataaaaggaagtgggaagtgatttttacgagtcgcatcgttaagcctccggtagtctacgcacatcctccagccggtaatggttcttgtggggattaattcattcttatcgttttgtatgacagtcatacctcctttcttcggaactgtttgtaccggacttactcaaggtgtgtcggaaatcggataaatcatacctggttccaaaagcttaacaacttcctttctcactacctccttcattgtaggatttagccttctttggggttgtctcacaggtttaacatcagtttccattaaaatcttatgagtacaaaaggatggatttatacctttgagatctgaaatagaccaaccaatggctgatctatgatccttgagtactttgatcagcttttcctcttcaaaccattccagccctctgttgatgatgaccggatatgtctcattgtcaccaaggaagacatacttcaggtgttccgataattctttcagctcaacttttggtgcaccggaaggaatatcatcttcctttacttccagctcttccatatttggttcctttgcatcttcagagctggatctttcttcaactgctgcttgtgtttcataaacatttgctgctgcaaatttttctgcattacatacagctgctgtcacaaaattctgctgctgtctttggtctgctgttgctgatttttctacatgttcctcatgtgtagtgctggttgcgtattgttctgtatcttcttcagctgctgcaacacctgcttcaaaacctgcacaaatcacagtatccaatacatccaaccgaaaacagtcatgttcatcattaggatgtttcatcgcatcaaatacactaaaaaccacagattcattatctaatcttagctctaatttgccctgctcaacatctatcaaagccctagcagtggctaggaaagaccttcctaaaagtagaggaatctcactctccccttccatatctaacacaatgaaatcagcaggaaatatgaacttatctacttttaccaaaacatcttctattaccccggagggtgtccttaaggatctatccgctagttgcaatgatactctagttggtttaagttcagctatgcctagagacttacacatagacaatggcattaaatttatactagcccctaaatcacataacgctctccctacatcaatattaccaatggctatagggatattaaaacttccgggatccctcaatttaggaggaagcttcctttgaataattgcactgcactcctcagtgagtgctatggtttcacattcttgcagctttttcttattggatagaagttccttcatgaattttgcataattaggcatattagccaatgcctctgcaaatggtatgttgatgtgcaacttcttaaacatctccaagaatctagcaaattgcttcttctgttcttgttgctttgtcaatattggatatgggggtttttcaaagcgtgaaaaatcccacttctttggtggaggcacaggttcttgctcctccaacttctctgcaactttttctttatcattctcagttgctgcagaatttttctcagtttctctagcgcttgtttcaggctcttccggagtaactaatatcttaccacttctagttgtaattgctttggcatgttctcttggattcacaactgtgtcacttggaaattggccttgtgacctttcagccatttgttttgcaagttggccaatttggttttccaagtttctgatggaagtgtcttgattagtccggtgagctcttgtttcagcaatgaattccgctgtggtttttgacagttgcatcaccactttttcaagctcagaaggttccttgtttgggagaggaggaggttgtaagtagttattggatttgtaatccaaaccacctccttgaaatcttctttgatggttatttccagctgcataattattgtttctttgatattgttgctgctggtatggttgttgttgctgtctttgatcgttccaaacaccgtttacctgtacagggtcagcaccaactaaaatagggcaagtgttagattcatgctcaccttggcaatactcacaaataatatatagctggcttgtccccacttgtgctgcagaaacttgcaatcggtctatcttctcattcaatttggccaattgttgtgccaaaatcttttgctctgcaagcattgcatcattagtggtcaattgaataggctctctctttggttgaagtgtatgactttcattctcatttcttgccaaagagttgattagctcatatgtttgtgcggcggttttggaccttatagttccaccggctgcaacattcactatcatccttgtttcgggagtcatgccattgaaaaatattctcacctgcttacctacaggcatatcatattgtgggcatctccttatcagtgcttggaatctcttccatgcagtacacagagtttctcttccattttgcgtgaagttggtgatctcgttcaccaatcgattatatttatccatagagaaatactccgcaaaaaatcttgaaactaagtcttcccaagttgatatactattagatgtctgacaattcaaccacctcaaagcatttccttttacggcaaatgggaatagacttagccttacagcgtcatcggagactccttggtgtctaatagtatcacagattctaaggaacctgtctatgaagtcatgagggtcttccgaatcttctcctccaaattggctacgttccaccaaagctatcaatgaaggattaatgtcaaaatggttagcttgaattggtggtctcacaatactagagttcggtcttgtgaacgttggagccagaatgtcctccatcagttcatcctcaggcctccgctgcttatttcgtgcgtcagccatatctttttcgaactctgaatctgactctatatcagaattttctgcttctcttcttcgtctttgttcagctaatctccttcggattgttcgttctatttcagggtcgaattgtgaatcctcggaattaactgttcttcgcataaaaactaggagaagcagttagtaacaaaaatttcaatcacaaaattttaaaactactgtaaaatccgttaaccaatccccggcaatggcgccaaaaacttgttgcgcgatttatgcgaattgatacggcaagtgcaccgatcgttaacaagtaataaagtaggtaagtgagttatcgtctccacagggattggaatgattttgcagtaattaaaacagttgtgattgaaaacggaaaacagaaaattacgcagaaagttgttgaatgattgtgttgattaaaaacgaacttaaacaaaacagtaaatttaaactaagaagataccaatgaataataattatggtcaggcacaatcccttatgatcattacttctttcatttgactgattattttaacttgaagtttacataaaataaatctctcctatagttgtaaatactagataactagcaatttcaccctttaattcgatcaagaaccctaaccttctagcgattctgtcaaactaagaattcagagaacaaatcttatgggttcgtgttctgattactcggagaataagtctttcctatattagttaatccctaatttcttagtgaatcaaccctttaaactgaaatcataacctaatgtcttagtgaaattaatcaattcaagcattcaaagaacatattataaactccgcactcatgcatccctatgtctaggtgaggaacaagtgttattcttaacaagtcagatattacaatcccaacgtgtccattgtgaattataaccctcagtactcatctagagtgatcaattctaaataagataaagtataagcacagaaaagaattaaagtaaacaaaacatatgcattcaataccagtcaaattacagaaggtaactcataagttcatggcctttccacaatagaagcttagcctgccataggcctcaagaacaccaaagcagatgaataaaacattgttgtgcagaactttggatcagaatttttatttctagggcttgcaatggtgatttatggaattctagggttacaactatattctcaaagtgtttctctccctctgtctcttggtctgttcagaagcctcctatatatagagccatttaattatagtaactaagccaaaacctttacctaatttcgaaacatatctctttaatacaggaaagaaaatcgatcccacgcgacccgcgcgcgataccgcgctagtcgcgtggaatgacagaaagaatggcgcttatcgcgtgatattggcgctacccgcgcggcttggcagaaagaaacaagctttatctttgaagttctgacgctactagcgtgaattatgacgctactcgcgcaggttggcagaggagaaaacccttaatccttgaggttctgacgcgtctcgcgtgataatggcgctatcagcgtggtactctcaggtcctccacgctggtcgcgtggtttccacgcttgtcgcgtggaatcttccagtgattgttcttcaactctgaacttgacgctactaacgcgggtttggcgcgactcgcgcggctcttcagaatctagcttcttcttttattttctcttgagttcctctttttgacctgcaaatagttaaatagtattgaattgcttaaaataattaaaaatactaaaaagaactactttttgaaactatttcctaactatttaattaaaatataacctaaaactaagctaggaataagatgtgtttgcaacacatcagagtgtgtatatcacattttttaaacttggaaaaacaactttcacacacaatgccggtatggctattgcaaaatatgcatacaataatgaacaatccttggaccttcattattacattgtataccaaataccatctgctaaagcaaataaggtcattgtcataaatatatacatatttatataagtacattctgggaaatttgcaaccaattagttgtatgtataaactaatggtactatgaaccaaacagaagccattccaacccgtatgacatagtttcgatcacacctgcaacaccaaaatgagcccaccaaaataaaccaacataagtacaatacatgttcagggcaagccgatgtccactactatggtaccagcataatatctacaacagtaacaaatcgacatatataaaacaaactcaccttttttaaacatttcgctggctggttgaaggaataaatgaagttgggttctctgtgaacttcaacaaacaatttaaaaattaattacaaaattacaatgtgactatgatgaaggcactactaactaataaaaaacaaagctatcaaactatataccatatgataattatagttatcaccgggaagaggagttgtgtacacctgttgacttgaaggaatatcaaaaccaccacctgcatcatgcatattttcagaggcatcattacacttctgtctgttatggcctactgctccacacctgccacatgtttgtatcctcccacgcctattactttcatcattcattgattgacggccactgtttcttccaataacaacaggatctaaaacaccctcaaatgcattatcagtgaacccttcacactatatatttagttgagaacatatgttattgttcttcaacttcagtctcttcagatggtttgagaaaaacaccagagtatcctcatagtcttcctcaacacgataagcagcctcacaaacctgtctagataactgcagcaatgttgcatatctcccaatatcttctgattcccaatacattgatgcttgtgggtactgtcccttaattacttctgttgcagactttgaccatctatccgctagcaacgacttaggaaactctgggatatttaaacatactaaaatagaaacaatatgatcacatggaagacccatggattctattctcaagcaagaacaattgaattcatatgatgatgggcaatacgaaacatgccaagtacatccactgcgatacttaacaactgtgtatataataaccgtgggtaaaaaaaaaaaaaaaaaaaaaagttactgtagcagtactgtagctccacgcctggggcgtgggaacccacgcctggagcgtgggaagtgctccagaaagccatttttggctggaaacccacgcctagggcgtgggaagccacgctggaggcgtgggaggcgcgggagaggcctataaaaggccattctatgcgttttttgggggaaaacccctttctccttcttcctctggcccaggcagccattgatgggcatgggaagctccataacttcatcacacctcatccaaacacctccaaatcactaataaacatgagagaaccttgtgagagctaagttccagccaagatttgagagaaaccccaattcctgagattcttcagagagagagctgagcttgagaagagaagaaggcgcttcttggatgttggagctaggagaagggattctccggccttcttcaacagttttgaggtaagaaactcagctttcaccgtttaattggtgatttgggtaatggggtgaatagtaaccaaatggtgatagggctggaattaggcttaggttccttagggagatgtagtcaggaggttgttctgagccatatggcatgttgaatctgagattgtgatgaagtttgagtttggctctgggacgagagaagtgtgtgtgaaagagctatgttatggcttgaattaacttaaatgcctttacaaaagtcattcataaggccaaataaacggtgaatatgtattaatatgcttgatttggccatgtttggtatttgatgaattatgaatgaatagactattgggattgactgatgcagagtcttaccaagactctcgggccacggtcaggctgagaatgatcctgttaaggatctgagagggggcctatgcagtgattaggccgataaccctaagtagtggttgagagatggtgaaaaggaatcatgtttcctttcatttcaacggttgagtaccgttgttagacacttggtatagtggtcctaatgtgactgtgctgtataaattgaatagggcaaggcatgatgatagcagcggcatggaccagccaaatgaagatagaggataaagcatggtcacaccaggtaagttcagtgttcttggagtgatttccctacttgggggtcactatttaattgattatatggaatgtgaacactaggttagtgccccatccttgatattaatatggatatgatagctaatgtagttaaaccctaagatagaggactgagctgtcttgggtataagagatataccctgatgtttaatgataagatgaacactgcgttagtgttccatggttttgatgagacgcagatcagagaatgatctgtgatggaacctatagggtaccggattggtatcgggctagatgaggttccctagccagaggaggagtttgaggactccctggaatagctgagattccatgggaggtgccactgctctccactaaagtcctagggatggttgactctatagggatgtccctccttaggcggtgatgatgaagacctgagagagtatactcaggcgattgtgatgagttgataaagaccatgaatgtggtctgtgtttgatgttagactgacactaggaaagtgtcgtgctttgtgttgattatgagtcttgttatgatgtgatttgagtatgtgataggtgtgcattctctggccagagaatagtggactatggaccccattgggaatgtgcccactcggtggatgatctcccttgggataatccataggcgtccatgtaaatcctgagtagatgtgcctttaagtagatgatcctattcaggtattgggcggcaagtcctgagtagatgtgcctttcagtagatgatcctactcgggcctgagtcctgaatagatgtgcccttaagtggatgatcctattcagttctcagtgtaaagtcctgaatagatgtgcccttcagtggatgatcctattcaggcattgtgtgttgattgtatatgtatgtgtgtgaaagtcctgagttgagagattcctcaggcattgtgtatgaaagtcctgagttgagagattcctcaggcaatgtgtgtgaaagtcctgagttgagagattcctcaggcaatgtgtatgaaagccctgagttgagagattcctcaggcattgattagagttcagtgaggttctggggagttgtgtctatcagatgattgccccagacgtgggactaggttccagagaacttattccctggatatgtgttacagatataacaaatacatataaataggagatgagaaagccgagatggctggtagttatgatatgagatgaaacataagctcatggagcttgagagagttatttactagacagatgatctctcaatgcagaggttgagggcacaggccttgttaggcgtgaataatatgtagtatgagaaagatgtttgatagtgcaccagggggaggaaagacctccaagaaccctgggcttactgagatttttatctcacccctcgtgggacttatgttgcagggataactgataaggtagtgatggactcaatggtgagaatcacaccagagtggagcactaggagtttattgactaaaggctgagagattggggctccttgtgatacatacatattgaggtagcttctgtctcctgccatatctatattgatatgtctgatatctgcctgtatttgattgtttgttttgattttgattatctggatcaataagggctagatgtaaagatgtttgagttgtatttgtgttgatgttactgtaccatacataatgtatcaagaaatgcgattcttgtatgcttccgcagcgtattttatgctttctgatattataatcatgttaacacactgggtgcacacggggtgttacattttatggtatcagagcgagatttcttgatggaagcattatatatggcaattctgagttgtttattactgttgttggaatttgtcatggtcgttgcatgtgtggacactagaggtgagcctgatcaactcactggttgggtgtacatgtgcaatgtcatgacaagattctggagcaacagtaaagatagtagaagcccagattgatccagtagtggctgtgtggacagccatgcagcttgagtaggctgcaagcaggcagatacaggagacagtgtagcacgagatggctgcaagcagtgagatgtagaagccttgatgaaggctagttataagtgtttgaggaggtgagaactgtgagtacagatgatagaaggttctccatacctccgactcctgaggacaagggcagttgccatcaggtcgggaatgaccacctgataagggaccgggtgtcccgggctgaggctgatagggagactgcagcggatagaaatgccaggagtagtggattactgctctcaatggctgaggaagtataaccttgaaggatgtgagacccactcctagatagatgcttccccgaaatgctaagagaagagtaggccaagtgagggctttgttcggggactgatgaacagagttggtcaagtttagatgagatgagtcactgaggcatatttcagataatttctgctagatgcggaagaggaaatgacccaaggttcagaggtgaacacacgaggttagtctcacccaggggtgctacttgggagagaagagggatcattgagaaatgtgccattggaccactgttatgttgattatgtgccaggaatggtccctatgttagagaaggcctatcagtggacggtagcccaaagtgtaggctggagtgatgcagtgcaggccagaaagatagttagagctccgcacctgatcagagatacaaagctgatcgaggttgtgatgtgagagtctggtgtgactctggagctactcactattccgatgggagttatactgcactacagtggagtaggctgagggtatcacagctcatagagagtattgccaagaggatatgcactgcaaagatgtgcagttttagtggatggcggagagtagacaattgagttgtgctgcctagttatacctaccctgagaaccatccgggatatggattgtttgggtaaacatgggatgaggctggattgttacaaccagaggatggttgagagttctggttgtatgaatgtgaacccattatgcttctaatggtgcgtgagctcgcataataggctaaaggaggatctgttatagatcctggtggtgatcagattcatgagtgtgattccagaaggattacaccactaccacctgagaaagaaactcggcctgagtcatctgtaaattgactcctgaggtagaattgattactatggaattgtcatcggtatccaagtaagtcctaagggaacggacctgatgtagatgatcttccttaggcattgggtgaggtccgggaagaaggtacccattgggtggacgatctctctcaggcgatgtggtatgtcagacaggtggtgtgatgttgatttcactattgacgccggacgtctcagaattgttcccaggcaagggaaaggactagtggaatgccaggctggcatattatgattattggctaccggagattttgtagtcgtatgatatatgcagttggggtattggtagaccccagagagttagaggtggtgatgtcttgggagagacccaaggacatacatggaatctggagttctttgaatgaacagatgattacaactccaatactgactccttggcctgagtaaagggtaaaggtcattgtgacacttccaagtgagggcttggatgagtattgtggtgggatgaaaggctgttgcctagacttcaggcaactgaagcccctgatgagttttatcctgctcatgaccagagttgcgcagaggaagcgtgatagggagttaccacctttatggtaacaggttagtggtggctagtaaccacaagagttgcatgtacctgctgagcagacattgctgggtatgagatatagacgaggaatgagattcctcaaaggatgattagagttgaatgatgtgatagatgtctgagcaggaagcatgtgagtcttacccgcatgacgatctcagaccctgaactgtatgcacagtgtggtgatgtgcactgaactgtgtctaagggtgcttgtgatcttgatttgagaaagatcaagatttgtaagtttgagatagagggttgggagatcagaaacagcagaatgttgtaagtgtcataattgagtagcaagaggtctctcgaagagccatgattggcattgtcttggccgagactcataaaggccagtttagtattcatccaggtgccaccgagatataccagaatttaaagagatgtttatggtggctagggatgaagagagagagacatagccgaacaggtgactaagtgtctggtgcgtcagaaggtaagattgagcatcagagatgtttggtcagatacaaccattaccgctccctaagtggaaatgagaccgcattcccacggcatatagtagggactgcttagaacccagactgaatgtgatttcatctggatgattatgagttgactgatttattctactcatctcttacctgtgtggtttgacgacactacaggggcattgtttcagctatatgatgtctcagaaaatgttatctgagatagagatctggaagtaaccactagggctcgtggtattctttagaaggtcttgagacccagctgcgactgagcacagcctaccatccttaaacggatggtcagacagggaggatcttcctccagagtcttgagaatagatggaggacctgtgctctagagtagactaccagctgggatagacatctacctccgatggtgttctgatataataacagttatcatgctggtgggcatgagggtaccttcagaggcgttgcatggccaaaggtgcaaaaacgcctgtgtagtggacagaggtaggtgagaggcagttcttggacctgagttggtttagaggaattttgaaccgatctctatgatcaaagacattgatgaaagcttagagccgacaaaagagttagtatgattatgaacacaggccgctacagtttatggagggcgatcatgtgttttgagactatcttctgtgataggtgtgggactagctttgggtgtgaggaggctaagtcctgggttcagtggtccttagcagatccttcagaggataggacagtggcctataggctagctttatctacccggttgtcagagctgcataatacttttccacgtgtcatagtagaggaagtgtataccagatcttttgcacgtggttaagcctgacatcattcagattagaaagaatctgactagtcctacacgactcatgtagatcgtggattggatggagtcgaaggacgaaaatttcacccagtgcttaatggttttggtttggaattttgcggacaaaattcctaaaaaggagggatgaaatataataaccgtgggtaaaaaaaaaaaaaaaaaaaaagttactgtagctccacgcctggggcgtgggaacccacgcctggagcgtgggaagtgctccagaaagccatttttggctggaaacccacgcctagggcgtgggaagccacgctggaggcgtgggaggcgcgggagaggcctataaaaggccattctatgcgttttttgggggaaaacccctttctccttcttcctctggcccaggcagccattgatgggcatgggaagctccataacttcatcacaccttatccaaacacctccaaatcactaataaacatgagagaaccttgtgagagctaagttccagccaagatttgagagaaaccccaattcctgagattcttcagagagagagctgagcttgagaagagaagaaggcgcttcttggatgttggagctaggagaagggattctccggccttcttcaacagttttgaggtaagaaactcagctttcaccgtttaattggtgatttgggtaatggggtgaatagtaaccaaatggtgatagggctggaattaggcttaggttctttagggagatgtagtcaggaggttgttctgagccatatggcatgttgaatctgagattgtgatgaagtttgagtttggctctgggacgagagaagtgtgtgtgaaagagctatgttatggcttgaattaacttaaatgcctttacaaaagtcattcaaaaggccaaataaacggtgaatatgtattaatatgcttgatttggccatgtttggtatttgatgaattatgaatgaatagactcttggaattgactgatgcagagtcttaccaagactctcgggccacggtcaggctgagaatgatcctgttaaggatctgagagggggcctatgcagtgattaggccgataaccctaagtagtggttgagagatggtgaaaaggaatcatgtttcctttcatttcaacggttgagtaccgttgttagacacttggtatagtggtcctaatgtgactgtgctgtataaattgaatagggcaaggcatgatgatagcagcagcatggaccagccaaatgaagatagaggataaagcatggtcacaccaggtaagttcagtgttcttggagtgatttccctacttgggggtcactatttaattgattatatggaatgtgaacactaggttagtgccccatccttgatattaatatggatatgatagctaatgtagttaaaccctaagatagaggactgagctgtcttgggtataagagatataccctgatgtttaatgataagatgaacactgtgttagtgttccatggttttgatgagacgcagatcagagaatgatctgtgatggaacctatagggtaccggattggtatcgggctagatgaggttccctagccagaggaggagtttgaggactccctggaatagctgagattccatgggaggtgccactgctctccactaaagtcctagggatggttgactctatagggatgtccctccttaggcggtgatgatgaagacctgagagagtatactcaggcgattgtgatgagttgataaagaccatgaatgtggtctgtgtttgatgttagactgacactaggaaagtgtcgtgctttgtgttgattatgagtcttgttatgatgtgatttgagtatgtgataggtgtgcattctctggccagagaatagtggactatggaccccattgggaatgtgcccactcggtggataatctcctttgggataatccataggcgtccatgtaaatcctgagtagatgtgcctttaagtagatgatcctattcaggtattggacggtaagtcctgagtagatgtgcctttcagtagatgatcctactcgggcctgagtcctgaatagatgtgcccttaagtggatgatcctattcagttctcagtgtaaagtcctgaatagatgtgcccttcagtggatgatcctattcaggcattgtgtgttgattgtatatgtatgtgtgtgaaagtcctgagttgagagattcctcaggcattgtgtatgaaagtcctgagttgagagattcctcaggcaatgtgtgtgaaagtcctgagttgagagattcctcaggcaatgtgtatgaaagccctgagttgagagattcctcaggcattgattagagttcagtgaggttctggggagttgtgtctatcagatgattgccccagacgtgggactaggttccagagaacttattccctggatatgtgttacagatataacaaatacatataaataggagatgagaaagccgagatggctggtagttatgatatgagatgaaacttaagctcatggagcttgagagagttatttactagacagatgatctctcaatgcagaggttgagggcacaggccttgttaggcgtgaataatatgtagtatgagaaagatgtttgatagtgcaccagggggaggaaagacctccaagaaccctgggcttactgagatttttatctcacccctcgtgggacttatgttgcagggataactgataaggtagtgatggactcaatggtgagaatcacaccagagtggagcactaggagtttattgactaaaggctgagagattggggctccttgtgatacatacatattgaggtagcttctgtctcctgccatatctatattgatatgtctgatatctgcctgtatttgattgtttgttttgattttgattatctggatcaataagggctagatgtaaagatgtttgagttgtatttgtgttgatgttactgtaccatacataatgtatcaagaaatgcgattcttgtatgcttccgcagcgtattttatgctttctgatattataatcatgttaacacactgggtgcacacggggtgttacagtgtacacactaaacattgccatctccttgcagtcaactacccttagcttaattgtctttgcaatagttggcctaagaagaagaaatatctccttagtaaggaccttcgcagcggatctctcaagggactgaagattggtttccaaaacaacattgccataattagaaaagtaatcagccacgatctccctatatcgaaaataagtcaggcatctttgaaattattccacaaagtcagtcaaattacacttcacattaacgtatttggaaacatgactatgtaatgcttcacaacgggatgtggtacagatgctggcaaaaaaattacctctaatatgtgcaggggaccacattttccttctaccatacaatttggtgatccaggtgttatcttctaactcatatttgacaaccatgtccctccatctttcctcaaattcaaacacatcaaaatcactaagcattaaacttttcaagcacttcaagacacctttgtcccgtacatggctcgttgcattgcgcatcaaatgccatgcacataacctatgatgagcattcaggaacactctcttaatggcgttctccatagctatattccgtcagtaatgattgacaaaggcggtttcccattcatggcttctaggaactgctccaacaaccacacatatgtgttctccgtctcattggtcacaacagcagcagcaaagactatcgtatgattatggtggttcacacttgaaaaaataacaaatggacaaaggtacttatttttttttataggttgatacaatcctaaaaccaaggcaagtgaaggaagacttggaattacacatggaagcacttcctttagtgattaaagggccaatgacaagggctagggctcaaatactccaagatcatatacaatccaacctcaatctcttggagaaccatggagaaggctacaaaatgctgaatttatctattgtaatcgattacaagtagcctgtaaccgattaaaagctttgtatagatgttagaattgtcaatagctctgctgtaatcgattattccatattgtaatcgattacatggaagtgtgagattatgtgagttcctatgataatcgattattctggcttgtaatcgattacttggttttgggagctcctgtgataatcgattatttagtgagataatcgattattttgttcatgagtcagtttccaggctgatatgagcaaagtaatcgattaccaagagttagtaatcgattatttgttccaaaataattgattaccattcgaaataatcgattattaccgttttctctacagaggcgcgatttttagtttttaaaacagctctttggatagctttccttggaagctgcatttgtatttcatttaggacacatttacatttcattagattacaatttcgtggtctatataagctacatttcaacagattgtaaggacttttgattgaatgaaattagaatgcactttgtgtgtgagaggttgagagttattctcccttgttcttagtgaagaacttcttgtttcttatcaatagcttctgagctattgtggtgattcttgcaagacttattggaattcctattccatggtgtcaatccaaatccacttctaatcttcttccattgtttcatttcttaaatcacaaaaacctaaaagctgtcctaaaatagagcctttcatactctgttttcctttccattgaagaattgattccattgcaaggaagattggggcaaacaagacttgaatcagttcagaagtctatcatttggtatctagagcttaaaccttgtggaattcttcttcaatttcagtcttgggattcttcaaagcaaaattctgcattagagtcaaaaacgaaaatccttagtaattccttgtttcttgatgtttcttgtgattcttagtgctgtagctttgttaagtgttgtgttacaaaaaccctaggttttcttcaagtttccttgtgaattcatgtccttcatgtttctcatgttcttcatgtgttcttcatagtttccctaatttttagctttgattcttgtcaatttgtgttagtattgttgttgtgctgtgtagtactttgttttaatttcaatttcgtgcttgatctggagcaagtgttagaaacaaaagaaaaacaattgaaaagtaaaagagaaaagtagttggaaaaacagaaaactagaaacaagctacagaattacaaatttcaaaattgcttgaacaacaaaaacaagtaaaagtgcataacatccagaattgatgaaatgtttgtcaacaattgaattcattggcatatctttattgtgaagtattccttgagttgtttcataaattccattttgagtagtcctttctaaattgtgctttgttgcttgtctctttaaaattccaaagttttgtcttagaagttttctattctttggactcttaagccttgtctagaatcatttcatatttcattttagcaagaggcttgattggacttgaagtttttgcctaagaactaaagagagaataagagtgaaaaaaggcaagagagaatattatagaaaaagcctgaaaagtgtgcaaacacgagagtgagagtaaacacttagagagtggtgaggaatttcttatatatatacttatgttttgctaacaattttctgtgaaggatgagttcaagtggaggagatgtcttgtcacctaaaacttctaggttgatgagagccatgacaaaacaaatggagaaattgcaaactagaatggatgcaaaatttgaagagttgcagaaggagaaaacaagaaagagtagttccatgggtagtgtggatggactgggtgatgatagtagaatgggaagtgattatgcttcttcttatggaggaaattactatgatgagaggaggagacaacatgatagaagagaaaatcataggagacattatcctaggaggttgaggagagaacatagagaagattaagataggaggatggagagagatgagaggaatggaggattgggtggaatcaaaataaaaattccaaaatttctttgcactaatgatcctaatgaatactttgagtgggaaatgaaggttgaacgaattttctcatgtcaacattttgaggaagacaagaaagttactcttgcaactatagaatttggtggttatgctttggagtggtggagccacattcaaagagatatagttgggggaagaagacaaagagtaaactcttgggaagatttgaaagcaagtttgaggggtagatttgttccagcttattactctagagatgttcacgatcttcttcaaagacatttccaaagttccaagagtgttgatgagtattataaggaaatagagttgttgatgatgagagctggaattgtggaacataaagaagcaactatggctaggtttattcatggtttgaatagagaaattcaagatgtggtggagctatattcttatgacacaattgaggacctagtgcatgaagctcaaagggtggaacaacaaattaaaaggaggaaaattccctattccaagcctagtggggctgcaacttctagttggagagataaaccaaaaggggagagttctcaagttagaagaagagaagagaaggtagaaaagccaactaaaaagattgagcaagtaactccaacaaaaaccggaagcatcaaatgcttcaagtgtctaggaagaggacatattgcttctcaatgtcctaataagagaactatgactttgctagatgatgggaagattacaagtgaatcctcaagctatgcatctagttcttcaagtgagaaagaaaaggcacttacacttgtggaggccgaagagagaggtcttttaatggttagaagaatgttgagtaatttgtgcctagataaagaggagaatcaaagagaaaatattttccacacaagatgtttggttagagacaaagtatgttcactcatcattgatggtgggagttgtactaatgtagctagcacaagaattgtggagaaattacacttgcctaccacaaaacatccaaagccatacaagctacaatggcttagtgaaagtggagaagtggtggtaaattctcaagtgctcattcctttttctattaatgcttatcatgataatgttctttgtgatattgttcctatggaggctggtcatatccttcttggtagaccatggcaatatgataggaaagttgtacatgatggcaaggaaatacttttgagtttgagcataaaggcaagaaaattattttgagaccattgactcctaaacaagtgtgtgaggatcaaattaagatgaaagaaaagagaataaaagagttgaaaaaaaaaatactgcacttgaaaagaaaaaaaagagtgttgtgaaaaaaggaaaggaaaaagaaaatagtaacaaaaaaatttatgaaataaaagagagcttctttttgagtgaaaagcaagtaaagagagtgttattggctcaacaacctctttattatatgcttcctaactctctttgtttacatgttgaaaagcaaggtgaaagtttgcccaaagctatgcaatctcttttggaagagtaccaagatgtttttccaaaggaaattccaaatggcttacctcctttaagaggtatagaacatcaaattgacttgattccgggttgttcacttcctaataggccagcctacaagacttcaccaatggaaacaaaggagattcaaagccaagtggagaaattacttgaaaagggatggattcgtgagagcatgagcccttgtgctatgccaatcatccttgtgcctaagaaggaggggacttggaggatgtgtacggattgtaggacaatcaacaatatcaccataaggtatagacatcctatccctagacttaatgatcttttagatgagttgcatggtgctactattttctctaaaattgatcttaagagtggatatcatcaaataaggacgagggaaggggatgaatggaaaacggctttcaaaacaaaatttggactttatgaatggttagttatgccttttggtttaactaatgcaccaagtactttcatgagacttatgaatcatgttcttagacatttcataggtaaatttgtggtggtatattttgatgacattcttgtttatagtgctaatttggatgatcatttggtgcatgtcaaggatgttttagaggtgctaaggaaggaaacattgtatggagcaattgatcaatgttctttttgcacttcacaagttgtgtttttaggttttgtagtaggtgctcaaggagtccaagtggatcaagagaaagtgaaagctatcatggagtggccaactccaaagaatgtgaaagatgtgagaagtttccatggtttatctagtttctatagaagatttgtgaaagattttagtactattgcttctcctttgaatgatttaatgaaaaagaccatgaacttttcttgggagcaagagcatgagattgctttccaaacattgaaggataagttgtctaatgcacctattcttgcattgcctaattttaatgcttcctttgaattagaatgtgatgcatctaatgtaggtattggggaggttttaattcaagataaacatccgatttcttattttagtgagaaattaaagggtgcatgtttgaactattccacttatgacaaagagttgtatgcacttgttagagttttgcaaacttggcaacattatcttttacctaaggaatttgtgatacatagtgatcatgaatctcttaaatatttgaaaagccaaggtaaacttaacaagagacatgctaagtgggtagagttcattgaacaatttccttatgtcattaaacacaagcaaggaaagtttaatgtagtggcggatgccctttcaagaaggcattgcttgatttcaatgcttgagactaaatttcttggttttaatcacattaaggagatgtatgtaagtgataatgacttctctagtatctttgctttgtgtgagaaaggagctcatcaaggatattttagacatgatggtttcttgttcaaagaaaagaaactatgtgttcctaaaagttctttgagagaacttttcataagagaagctcatgaaaacaatttaatgggtcattttggggtggataagactttggccatgttacatgaacatttcttttggccaaaaatgaagcatgatgtgcatagatttatttctcaatgcattgtttgtcataaagctaaatctaaattcatgcctcatggtttgtatacacctttacctatccctaactctccttggattgatatctctatggactctgtccttggtcttctaagatccaagagaggaaaggattctatttttgttgtggttgataggttctcaaagatggcacacttcataccttgccataaaagtgatgatgcttgtgaagtggctaatcttttcttcaaagaggtagtgagactacacggattaccaaggagtattgtgagtgatagagacaccaagttccttagtcatttttggaaaacattgtggggtaagcttggtactaaactcttattttcatcaacttgtcatccacaaacggatggtcaaaccgaagtggtaaataggaccttgggtcaacttcttaggtgctacatcaaaagcaacttaaaatcttgggaggaatgtttacctcacatagaatttgcttataatagagtagtcaatagtactacttctatgtctccttttgaagttgtttatggctttaatcctttaattcctcttgatttgttgccattacctaacacatcttctatgattaatcgtgatgctttgtctaaagcttcttatgttaggaagatgcatgaacaagtgaaagcaaatgtggagaggaaaatggaaaattatgccaagcaagccaataagcacaaaaagcaaataatattcaaggaaggagatttggtgtggcttcatttgagaaaagatagatttcctcatgaaaggagatccaagcttcaacaaagaggagatgggccttttaagattttggaaaagattaacaacaatgcttataaacttgaattgcctaatgaatatggtgtgagtaatacttttaatgttggtgatctttccttgtatgatgcaggtccaaatggagaaataaacttgaggacaagttcttttcaagagggaggggatgatacaatcctaaaaccaaggcaagtgaaggaagacttggaattacacatggaagcacttcctttggtgattaaagggccaatgacaagggctagggctcaaatactccaagatcatatacaatccaacctcaatctcttggagaaccatggagaaggctacaaaatgctgaatttatctattgtaatcgattacaagtagcctgtaatcgattaaaagctttgtatagatgttagaattgtcaatagctctgctgtaatcgattattccgtattgtaatcaattacatggaagtgtgagattaagtgagttcctgtgataatcgattattctggcttgtaatcgattacctagttttgggagctcctgtgataatcgattatttagtgagataatcgattattttgttcatgagtcagtttccaggctgatatgagcaaagtaatcgattaccaagagtgagtaatcgattatttgttccaaaataatcgattaccatttgaaataatcgattattagtgttttctctgcagaggcgcgatttttagttttttaaaacagctctttggatagctttccttggaagctgcatttgtatttcatttaggacacatttacatttcattagattacaatttcgtggtctatataagctacatttcaacagattgtaaggacttttgattgaatgaaattagaatgcactttgtgtgtgagaggttgagagttattctcccttgttcttagtgaagaacttcttgtttcttatcaatagcttctgagctattgtggtgattcttgcaagacttattggaattcctattccatggtgtcaatccaaatccacttctaatcttcttccattatttcatttcttaaatcacaaaaacctaaaagctgtcataaaacagagcctttcatactctgttttcctttacattgaagaattgattccattgcaaggaagatcggggcaaacaagacttgaatcagttcagaagtctatcataggtcgcatcgaaagcaacaacatcaccaaacaccgagtagttcaatttactttcagcatcacaccaaaacaaattctgcagccgttgacattcatcaaccgtgtaggccacaaacataattggatccttttcaaataattgatgtatgtactttaatgcaccagtcgcattggatgttttatgcttcctcatcctgccttgtacattatagatatccttccttatgaaccctaccttatcatatccaccaacaatgtttgcaagtgaggcatacatctgaggtgccataataccaacctttctaaaattgtaaatctgcatcctatcactctctcccattctcttatgcaacagtaacaaactacaatgtaaactttccaataaatcatgattatgatcaaaattccaaaatgaaacataccatacgcgagtcgcataatcaacatgcacacgacacatcgcctggcacccacacctagttacattcttcggtcgttgttttcgcgtgtaccaattgtttttttcccttcttaaaccagcccatgagcaaacatacgtctgctggacaatttcgccattattgttttttaaaatgtgatcctttcgcatagaaaacccaacaattctaccataccaacaatagaattgatatgctatttccaactcacaaaatctaaatctcccaacatcttcaatgctaattctatgcatatcaagcatcctaatatcaaccatgctattaataattatcacagttttcttctaactcagctgactcatcaacctgttcatcatcttcttcatgttcaaactcatcatgcccaaatattggtgtatcaatgttgtcactcccataacaatccgtcatcatgagaccgaaactgacccaaaccctgtcaaaatcacataataacaatcaataatttaaaccttaataaaccaacctattttgcctcaccacatacataatcagtttaccaccttgcaatcaacaattatatattcacatacataaagtcgatggcaatacacaaacactactacagatcaccaaatcaaattattaccaccgccactgtaacaagtcataaattgagacttaaagtgtatacaaaatgaaacctaccaaccaacccacaaaactaccaataatttgtggtttcaacctcataatcattaaattacatgactcacaatgtcttcggtatatattgacaaacacaattacaatacatgccgactgtttgcgtatgtcttcatgcttcaaaaattggtaatctgagctcaaactcgacagactctacatacatacatacatacatacatacattcacaccaaccaaaacaccaatgctacatgcatatatgtgcaatagatctcacaatccactacatcgttaatcatatcatacttccaatcattttcgtacctttcacaacaatctcggtttgtcgcagctgtacacgatcttcactattcagcccttcgtttcacaactttccaccaacacacacccacacaacaacccgttcttgactatcattttcgacgaactccagattccagatgtgcacagccgctacctacacgagacgaattcttttggacaaaacaaacaaacaacagccaaacagatgtgcacaatcgctacctacacgagacgaattcttctggacgaaacaaacaaacaacagccaaaccatttcctttgtcctgtcctaaaccctaaacacgtaaaaaaccttttatacaagggtaataccgtcataacaccttaataaaaaaaaaccaaattcaccagtacgtaataatggcacagttcccaactcctacggggtaataatggaataacaagaaaggcgtttaaatttgaaattccaaaaaccaaaataaattaccagccgcacggttcctgagctggtaaccgaaaccgagatcaaacgcattatttcgatccaacggccaggaacgcgtttcgtaacttaagcctgacttcgtctttcgtagtatgatgtttctttcacacgctacctcactttaattaggacagatttcaattggtatttctcaatatagtaatataatagctttcaaatatatatatatatattttttcaatgaataaactttaaaaatgtataaaaaaagacatcgaaaaataataaatatcaaaccacaagttaatagttgtgcatagggggggcaagtaaacatcacttgtccaacatccgatatagctgattaaaaaaatagtttcaagcgattgagttcgagtgtcgggttaagagaaagagaaaaattagtttcgtattgatagttttgtatagattctattgtgaagtctatattttagtgtacctctttttttttttaaacctttccaaagttttaccacagtcagataataattaaatattggacaattcagatcgctgacctgcaaccggtgttatataataattaaatattggacgatttagatcgctcacctgcaaccggtgttacctgtttttgaaattttgcaagatagtccttgtacaacaaattatcgtaggtaatttgtggaagaaaaaaaaaggtatatagttatttttgtctttcaatgtatggagtgttaacaaattcatccccgaaagatagaaattcaaattttagtccacgaaaatgaaaaaatgtaacaaattcattcatccgttatcattaatgaaagagcctaagtgacacattcaggaacgaatttgtcaacgcattatacattcaagagcgaaaatggctatttatccaaaatataatttaatcttcatcttctccccttttttaatcattgcaagcataacattacaataaatacttaaaaaataggaaagtaagtataagttagaacaaacaacataataagcataatattgattcataagcataatttgtctgttgctctgaaatttctattgtgacaacattaggtagtgacaaaatcaagttgggtctcattttttgtaaggattaacttaatggctatacatttttgtttgtgtctcatattttgggtaaggtattgtcatattaaaaatttcagaacaatagacatattatgcttattaatcaatattatgtttgttctaacttatgttttctttcctaaatttttttaagtgtttattgtaatgttatgcttgtaacaattaaaaaagagggagaagatgaagattaaattatatttttgataaatagtcattttcgtctttaaatgtgtagagcactgacaaattcgtccctgaatgtgccacatatgttctttcattaacggtaatagaaggaagtcaacatatggatatatttgtcgcattgttttcactttcagggactaaaatttgaatttccatctttcggagatgaatttgtcagcgctctacaaattcatggacgaaaatgactatttacccaaatcaaaaagcgtggtaatggtgataaacccaactagaagtgtgggacagtaatttgtgcaaggaagcctcattggagtcgtgatcaggattgtccctcaaccacaacgtttgagcgtttatgtgggtgacatccccttgtgcaggttgtccttcgatttggtttgaacgccggtttgattcctcttcattgcaattcacttggttttgacaccactttgttagcttcaggttcaccctccaaccctgtcttgcaaggacaatcatcatcctcgcactgtcattgatgttggagtctttatcattcacgaatgagcaattggtttggagattttaggaatcattattctcattgctattaatttaatcattttgttggttatcccatcccactagtgtatccttacgtagtgtatccttatattgaagtaaggtgtataccatttttacatggattggattgtctgataatatattttgcattgatagggttgtaaattacctagtggatccttatattatagttaaggtgtatgataaaatgtcaataccatttttgcaagaacccaaatggatataaataaatcagaaggatcattcgttgtaaatttgttgtttggcatgtaaaggctcgactattgcgagtgagtggcaacacaaagtttttgtgtaggtggtgaccatatttgcacacagagggatatgcaagtaaaaattggggagtaaatagcaaaagccttaatttattgttatccaacccgtaatttattgttataccctcccgacattggattgaattcattagtcattgacttgcttcgcaaaatcattacagacaatcacttaattgggctggacacgtctcatttactagtcatacttaccagcccaatgatatgcatagcccggtttagtttaagcacaaggagttttggatactatccatgaaaattttaatacttattaaaccattttaaaatcattattcgattttatgatttaatttattatagtttctatttttctctttgtataaagtcataatgtgtgataatgttttttaattggataaataggcttttttgtccctggatgtgtagagtgatgacaaattcgtcctcgaaagatgaaaattcaaattttagtcccaaaagtgaaaaaagtgcgacaaatttatcctttcattaactttcgtctgttaccattaatgaaagagcttatgtgacacattcagggacgaatttgtcagtgccatgcacattcaaggacgaaaatgactatttaatcaaaatataacttaatcttcatctttccccttttttaatctgttgcaagcataacattacaataaacatttaaaaaaataagaaagcaagcataagttagaacaaacataataataagcataatattgattaataagcataattgtctgttgctctgaaatttctattgtgacaacattaggtagtgacaaaatcaagttcagtcttattttttcataaggattaacttagtgattgtgcatttttttttagtctcatattttgagtaaggtactgtcacattagaaatttcagagcaattgacaaattatgcttattaatcaatattatgcttaatattatgtttgttttatcttatgcttgctttcctttttttaagtgcttattgtaatgttatgcttacaatgattaaaaaaggggaagaaaatgaagattaaattatattttgagtaaatagtcatttttatccctgaatgtgtagagtgctaccaaattcgtctatagatgtaccatgtaggctctttcattaatcgtaatggacgaaagtttaacggatggataaatttgttgcacttttttcactttcgatgactaaaatttgaattttcatcagtcagggatgaatttgtcaatgctctactcattcaggaatgaaaatgactatttaccctttttaatatcatttcatatttattaaaaaataatttttctgaaaattattttattttattacagtgctctagatctaacagaagagaaaaaagtttaagtctaggtcaactgtgtgtcacttaagccgtatatggatcttggacagttaccttaaaccttacctgacttaaatctaggtcaactatgtgtcacataagccttttggggatgttggacatttatgtttcactttaaccttatttggcttaaatcaaggtcaattgtgtgtcaaataagccttttagggatcttgggcaattatcttaaaccttacatggcttaaatcttggtcacctgtgactcaaataagccttttggggatcttggaccattatgtttcactttaaccttatttggattaaattgaggtcaaccatgtgtcgcataagcgttctagggatcttgggtaggtatcgtaaaccttacttggctcaaatttagttaattgtgtgtcacataagccttctggggattttggatggttatgtttcacttaaaacttacatggcttaaatcgaggtcaattgtgtgtcacataggcctttggggatcttgggtagttatcttaaaccttacctggcttaactctaggtcaactatgtgtcaccttagcctcctagggatcttggactcttatcttaaacattacttgccgtaaatctaggtcaattgtgtgttgcataagccttatgggatcttggattgttgtcttaaaccttaattggtttaaatctaggtcaattgtgtcttacataagccttatggggatcttggacacttatgtttcacttaaaccttacctggcttaaatcgaggtcatttgtgtcacataagccttttgggggtcttggacaattatctttcacttaaaccttgacttaaatatgggtcaactttgtgtcacataagccttctaggaatcttgggcaattatcttaaaccttacctagcttaaatcttggtcaagtgtggatcttctttttctactctatttctcttcaaccaaatcaccatcatttgtactttatttcttatgtattctgttctttcttatctatttcttttattttctcttctcacatattctcttccattctctcatttctccctttacaaccaaacacaccctaaaacataaacataaagaatctggtatattaaacatagtttgaacaagtagaaataaacacttaaagtaatcgttactaaaaaataggcttttaacatcagttgttttttactttcaacatcggattttaaccaatattgaaaacaccgacgttaaaagtatcgatattaacatcaatttttaaaaaccaatgttaaaataaactacacaacctcgattttaaaaaaaaaaaattgatgtcttataataagaaataaagaaaaaaatgtaaaatatgcaaaaatcaacaccattttttagaaaactgatgttgtgttgcacacaacatcgattttcaggaaaatcgatgttgtcaggtgtatcacaacattgattttcagaaaaacatatgttgtggtgcaataacaacatcgatttttctaaaaaattgatgtagaaaagaaactttctatatcggttctatcaaaagcgatgttgaatagtacttatatcagttttgtctaaaactgatgtaagaagtgtcttttccacattgatttttcttgtaactgatgttttatattcactttctacatcgtttattacataaccgatgtagaatgtcttttaaaaaaaatgacctattctctttatttccctccctgtaatttataaaaggcacattaaaagcttaaacaaaaacttctattaacaatatttggtattttcttatatcaacaattaatatttggctttttttgataggatgtaaatgactatctttttcaaattcaaaccagcataaaaaaaaagattcagctcacaaattattgagacaggatagcacttcatacctatggtgttttaaggcatggaactgtcaaatgaactactacaaaattttcaacaatttagtagccataatagtgcaaactgagtaaattgagaagaataaatatttgtcctttgtaaccaatcaacaacatgagttgaataaaaagtcaaaaatcaacattattaattacattacatatttgtggctgcaagtgaagataatgaaatatgtcaaactatttacatgtacacacatacataaagttaatcttgttcttggtcctacaaccatacatggatggtcaagaaaagattgttttaattagaattaatcttaannnnnnnnnnnnnnnnnnnnnnnnnnnnnnnnnnnnnnnnnnnnnnnnnnnnnnnnnnnnnnnnnnnnnnnnnnnnnnnnnnnnnnnnnnnnnnnnnnnnnnnnnnntatatatatatatatatatatatatatatatataatcatctcatatcaatatgtattgatgattaagtgggttattttttgtgtggtgagtagaaatatgagagttggagattccttctatagggaaagagagagtatgtaggacatttactccttaaaagtaaattaatgacatgccaaaaatatatatccataaacatctaaattttatttaaatttctattaattgaagaatatatgtgtatgtgaaaattttgataaataagaaatataaatttagggcatatatagatggtcaatattaaaatttagttagtgattacattattacttaaataaaatatgtgctttgagtttgacctgagatattttttgaaaactgttctttttgagttactctagttaaattgcaagaatcaatataaattatgataacattgagtatcatatgagattggtttcatagttatcacgaatagatttatactagctagttcaatctaattaatgaacaatttaatgatgttagtaataagtcgaactaacttatttaataacttgcaatagaggctgactgagcaaagtagaagaatgaggaagtaggggaaacaagctgtgggcgttggttgaatgtgcgcttcccatgcccacaaaagaaacttctacttaataaaatgcctacaaacttggcagaattaaagcttttaacattcaggaagatgttatgtaaatatatatttatttgctgatcattacattactcctagacagtctagtctatatgtccaatgcagtttttatatggaaaatcaattggactttcctatacgtcttctcttcttattccatcgtaatttgttggaaatctcatagcatcactcattatttgtttacataaacaaaaaaccaaagaaaactttaggacctatggctattagtaccctgccttacttaagaattcaaagatagtaaaaaaaaaacgtatatctccatactcacctggagaagaaggtagctctggacatcagcagaattcttaatgactttgaagatctggccatagtaaatatggaagtttccagcatcttccacctttgaaaagttacctactttcactgctggggtggctccatggacacttccgctgttaaataacctaaccaatgctaagaaggagaaggcttgtagccaagaacaagaaggagctgaatccatgagctaaaagagggacctcttgttgctatataaaaataatgtgatcattggagctaattatatttaacatgttagctcattatctttatttttaagccacttttagaaggaaaaagctatttaactttggacagcctcagtacgtaatatgtgtcgacacgtgcagaaggcttaacattggcattgagcaaaacataggtaaatctttaactagcgtgcattaaagagctcagcttaataacgaatttaaattcagaaaaaatatatattgaataagggactgctaagttgcattgaataaacaaattttggacaaatgtttggtgaaatgaacggtatgcaactggagggttactatggcaacgttatctggtaagttgtatgaggaatctattcctgagaaggttgtgacatgagaatctccctagtgaccttcactctagaaaatgtgaaaatgaacaaaacattcatcaatgataagtcaaatgttcaactcacttttcaatttttcaaacacttctaacaaccattctttaaccacctctatgaaggataaaagaaagggtgagtatatctcctgaccaaatgatcgacaccatctggcaccctctcatacaggatcaattctgaaatagtacttccctagcacctgcaaaatgtattgtatatttgtatatgatcattgatgaaggaggcaaatgtgaaaacgatgatccttgcgaactcgaaactcataggctacttagatatacttacagttaacccggtgcacttatcatggaagcaaactgtttcactcagtgctctgcaacacctctggaatcatcctgaagtaacgtcctatataaaagagagggggaaacggaaaaaatggagtttgattggtataatatggaacgatacataatgagcataagcaaatgagcttgaacaacataacaaacctatgaaacattagctccaattgcccatctatggtgctggagcctccccatagctctatctaccaatatagaaaactcgttgcttttatctttcaggtaaatcccaaggttgatcggaaacatgaaactagattccattagtcaacaaattcaaggattgtgtcttgcgtgtattaatgtagcatcttgtaacacacgtggttaaacaaaacatacagggtaataatttccatctacaggttgatttacttccaagtgccagtcttttctatagtctcgaacctgtaaaagtatgcattattgtaacaactcattaggttaggcattcatatgccataatccccaacaaatagaaggatttcgtcaatcccaatagcacgagcatgattttgaatctgataaagacccaattttcttctttataagaccctcttttatcagattattgcaccaatccaaatcaagtcttctaagataaaataaaaaataaaaaaacatgacattcaaaagcacaagaaaagaaacaatgttaaagcaattaagagtacaagggtatattggtccatgccccagagacatgaccgttctcacagacataagctcgaacaattggttccccatcgagatagtagccgaagccacgtctgtaacaacccaaaatttccataactatagttcaatagatatttatgaaagtcttaagttaggaaagatttgattatgtgggtgaaatatcaattagagacattacgaaaatgtttgggaaaaaatgaccatattgcccttaccgtaaatttgaaaagacaaaaaatgcccttgagggtaaaaggacgataatgcccttggatattttgagaattacaaaagtgccccaagatattttaaaaagatattttaaggtgaaaacttacataaatgcccttggatattttggaaatgacaagaatacccttagatattttgaatagatatttctatgatgaaaatgacaattacgccctaggataaaggataaatttaccataatgcccttcaggccagaaatgatcagatattcttagggattctgtgagaacctgatggaaatacagagatggaaatacaaaatactcttagatagcagattatcaaaataatttgtgacagaaaaccataagtggaattaggtttttcttaagcatccaatggtataaaaggaagaaaaacttatgttcccatccctaggtgtgaagagcacatgtagaaccatgtagaaaggaggagaatattcatgaaagtcacttgtaaaagcaagccatgtaatgaatacaagtgttaggacacttgtaaggcacatgatgaagatttttctccctttttcctctagcattcacgggaagcttggagaataatggtgaatcttcatgattttgccaactcaaagggacacttggaaggagattaagagaaggcttcatgaattggacaagtatcaagacacttgtatggtgtagatttagtttaagtagatttttcttaaaaagcaaaaatcttatcttgtctcctttggcagaacacgtggacagttctagacattatttcaacaatcccaatgatcaaaagttaaatatgtgggataggagtatacctttaaaattttaaggagatcaaacggttaatgaatccagaatcaatattttactaaaacgggttttgggataaactcaagaatgaagaatgaagaaaagcaccatttttcaagaattgggacacttgtatggaggaaaaacaaggaccattgtgatcggaacatgtgaaaagttagccataatgacttaggagatatttttgtaataaaagctttttaaatcaattgtccgaccctatataaaggagggagtagactgaaaaacaccaagtccttctccaagaggaagtgcgtgtgaaatccctcttccatatcccttccatcttttcatttccaagcctaaatcaagttagaaaagaaaccccaccatattaaagcaacacgaaagctaggagaagctagggaaaagtttggcaagttgttaggaagaagttatcaagcctttaagaggagaaacaaggtatgtgtagggatgctaaaatatagtttgaatattaattgtgctaagattgtacaaaatttcatttgtttccataaaaacaagccttgcataccatgtgttcgatgaaatgccttaaagagataaagattgtttaatgaatgattgtttgaataagtgacttgaatttagcttgatgggtgattatttagatgatttgaatctggtgtattatgactgcctttaagaaaatgtttgatttgaattgtagttacatgatggaatgctttactaaagtttatgtgttatttgaaaaagttttatatattgtggaagtgttctatgaaccctcgaacatgtctatgaaattttatactaagttcatgctgaaagtttaagcatttgagatataaagtgacaattaatattgaagagtaactatgagatacaagagaatcattcatgcatgtttcatatgcatatgcctgacgggggttaatccgtgttatacctggcgggggttaatccgtgttatacctggcgggggttaatccgtgttatatgcctggcgggggctaatccgtgttattggtaccaaagataaagagagtcatgcatcatttaaataaagaatcatgcatcatccatgcatcttattttatgaaggctattacgactatctatgaatatgttcttttatttaaactatgtttatcataaacttgccctatcttttgtgtctgtggttgacacctgcgatgacctcaatttatttgggcgagcagaggaacagtaaaagcatagcaagcagatggattttgtagaagatgttggaaagctattttgatgcggatattttgtaataattatgatatttgttttggtgatatgtattatgtaatagaactaagaaacagtctgtattttattagtttggactgtattatggattgaatttaattattatggacttcgaacgaacacgattacaatattgatgattagtaccttttgtatgaattattctaagcaagaagaaaagaattttccgtgaaatttataactaagataattctaaaagcaagtggaaaagaaattccattcaaaatcaataaaatacaagatagtaaaatgaggtgttacaacgtctgaggcagaaggcaaattggatatcccatgtgtgctggcatttgcagaaggcgcactcgagatcgatcttccttctcttctcgtggctgacgcttctccaaaccgcgctcgctttgaagttatggaagaaccctcggaagagcatgtagttgcgcctctggtgggagtggacgcagtcgggccaatcgcggaactgtctcacaagaagtttgcatccctattctctcctcagatcctgatagtcgtcagacaaatgcgaatttccgaaaatgttcatcagtttcgcagtattccgatcggcggggattccgatatggcaaaggcccgggcaacacatggcaagcttaaggagggaggaccaggtggagggggaatcagagaagaggcatgagaaggtttgggagcatttggtcttccagcagaagtgacaaatgagggtcgagaatcagttttttactaaagccttgctgggataatcgattaccattatccgtaatcgattacataggctatttgagaaaagtcacttttctgtcttaatcgattaccaaaccttgtaatcgattacacgttcattttgaaaatataagtctcctgctttaatcgattgcatagtgcattgtgttatcctgagacttctgtcttaatcgattatagctcaggataatcgattattttgctcgttgctgaaacccagaaacattcttgaacagtttaatcgattacatggttattttaatcgattacgtaagcggattaatcgattatcaggcgcgtttaatcgattacagttagttacaaattttgttataaataggattgaaggcttggcttgttttctaactttgagagatatacccattcgtatttctgagctcacacaagtcttctaagcaattcctaagtaatcttctcagtgtttttacttcttgcttcattaaaaacatcaataggtctttgaatgattcttgagcaagattcctttcaagattaaggaaaaacatgttctgatttagttagctactcaacctgatttggtaattcatatgcatttcattcattggatcatcaggttgtctctctccttaatctttgtgtgtaaatttggttctgaatttctgttgtatttggctattgtaaagtgggttcttcttggttttagagaagggttctctaactcaagaatagagtagtgttctatggttctttctccttagatttctaatagggttttagatttctattctttatctaaagttgataaaggggaggtttttgtaaaagcttgtaagaacagaaatttataatagtggaactctaatctagtgttgattagaagaaattggatgtagcttcagttgtgaagtgaacaagtataaattgcttctttgattttatttctctatctctcatcttattcattgatctttgattctttgattcatattcattgttcaacaagttttgttttgatctattgatttcttgggctgagacatttgattgagtaaaaagatttcttggttttgaaagtgataaagatcccgaactctgatttgaataagtttttaaaataccaaggttttaaccaattcacccccctcttggttattgtgagtatttctattattttcaattggcatcaagagctagttcttgaaagttattcaagatcactattatttcctatgtttgaaggggagcacttccgtttttggaaaaatagaatgaaaaactttattcaatcaaatcacccaggtgcttggaatgctatagaaaaggttccttttattccaaagaaaattgttgacaatgaaatgattcccaaagaatgggatgacatgatagatgctgaacaaaaggttgtccaatatgattttaaagctaaaaatatgatcacctctgtactttcttctgatgaatttttgagaacagtgagatgcacaagtgcaaaagaaatgtgggagatgctggaaattactcatgaaggaactgaagaagttagaagatcaagaaagcatgcattgatccatgagtatgagatgttcaagatgaacaccaatgaaagcatttctcagctacaaacaagatttactcatattgtcaatcatcttttgggtcttgggaagatctttgatactaaagaactaaacatcaagatcttgaagtgtctcacaagaccttggcaaccaaaggtgacagcaatcaaggaatctaaagatctatccaagatgtccatggctgcactatttggtaagttacttgaatatgagcttgaaatgtctcaactaacttgtgctgaagatgcagaaaagaaaaattaaaatattgcattaaaagctgcatcatcaaagtcagaaaaagtggaagattcaagtgaagatgatgaagaggacaacatgaacttggttgtcaagaagttcagcaagttcttgaggaaaaacaagaacaaaaggttcacaaagaacaacaagaacaagaacaacaacaacaacaacaacaagaagattgacaacaattttacttgctttgaatgtggaaaatctggccacatcaaatctgaatattcaatctacttgaaaaagcaacaagggaataacaaggtgaggaaggaaggaaaatctaaaagagcctacatagcttgggaagataatgagtcaacaacatcagattcttcaactgaaaatgaagaagcaaacatgtgtctcacctccacaatcaattaagaagatgatgatctatcaagtgatggagatgaggtaaattctgaacttgaacaagctattaatgctttgaaagaaatgcatgaagaagcccaaaagcttgcaaaatccaataacaagctcaaaggaaatcttaggtggcatgttgcaaaaattactgaattgcaaactgaaatttgcaacttgaaaggagaaaatgaaaaacttgtttcaagttacaaaatgaatggatgtgtgtgtgcttcttcttctactaatgttgacaaatatagttttctgcaaaaagattttgatgattacaaaagaagtcaaggagaaaaatatatgttactcttatccaagaatagtgatttaattgatcttttgacaaagctttacaaagaaaaatgcagcttggctgaaatgttaagtgtgcaaaagtatgctggagatacttctggtttagggtacaaacaaggctcaaaatcctttggaaaaaatatatttgtgcctccaaaatagaagaatcaaaagaagttcaaaaactcaaggatcaatcaaaatgctttcttaagaaaatcatcaaaatctgtaacatgcaactattgtatgaaaaaaggacatacatcttacaaatgctatgctaggagattctctgtgcctaatggagattggatttgggttcaaaagaaaaagaaagttgctaacccctatggacccaacctcaattgggtaccttcctttataaattgatttgatttttgcaggtctgtctaagagctagatcctcattatggtaccttgatagtggatgctctagacatatgacgggtgacatgtctatgcttacaaatctaactcttaaagatggaggatatgtcacttaatggataataacaaaggaaagatcattggagaagacaacattggagatagcttcaaaaccaaaatcaaaaatgttctttatgtagaagggttgaagcataatctcttaagcataagccaactctgtgataaaggattcaaagtctcattcaatgagaattgctgcatgatttgtgatgggcaaagtagtgaagggattcacataggtaaaaggaaaggtaacatttatttactttcaattgatcatgcattcttccacaacacttcatgtctaattagcaagattaatgaatctttgttgtggcatagaagggcaagtcacattaacatgcattatatgaacaagataattaaaaaggatttagtgattggtttatccaaactcaagtttgaaaaggacaaactttgtgatgcttgtcaaaaggggaaacaaaccaaaaattcttttcaaagtaaaaacattgtttccacctctagaccacttgaattactgcacattgatttgtttggtccttctagaactatgagtttaggtggcaattattatgggcttgtcattgtagatgattactctagatttacttggactctgtttttgaaatccaaaagtgatgctttccatgcttttagaaaaatggccaagcttgcacaaaatgaaaaaggtagaaaaattatctcaataagaagtgatcatagtggagaattccaaaatgaacattttgaaaaattctgtgaagaaaatggaattaaccataatttttcagctccaagaacacctcaacaaaatggtgttgtggagaggaaaaccagatctcttgaagaaggagctagaactcttcttaatgagacaaatttgccaaaatatttttgggctgatgttgtaagtacagtttgctacactttgaacagattacttataaggcctattttaatgaaaactccttatgagctatacaaaggtagaaaatctaacatttctcatttgagagcttttggatgcaagtgttttgtattaaacaacgggaaagaatcacttggaaaatttgatgctaaagctgatgaagcaattttccttggatattcattacatagtaaagcataaagacttttcaataaaagaacaatgtgcatggaagaatctgtacatgtgatttgtgatgagtctaatcactctaaagaggaaaagaagtgtgatgtagatgcaggtcctatggaagaatttattcagtttaatgattccataaataaagagaaagaagaaccaagtgctgaaataaaacaatcaacacctgttcaagagcctaaagattggagaataacaagagatctctcacttgacaacatcataggtgaagtttcaaaggtagtatctactatcttcattaaggaacctatgttgtaatatgacttttgtttctcaaattgaaactaagaatattgatcaagccttacatgatgaacattggatgcattccatgcatgatgagttaaatcagttcaagagaaatgaagtttgggaacttgttcctagaccaccctctctcaaacctattggtacaaaatgagtttttagaaataaacttgatgaaagtggaatcatagttagaaataaagctagattggttgctaaaggttacaaccaagaagaaggcattgactatgaggaaacttatgctccagttgcaagattggaagccattaggttgttgcttgcttatgcatgtttaatggattttaaactctttcaaatggatgttaaaagtgcctttttaaatggatacattgaggaggatatatatgttgaacaacctcctggttttactgattttaaacatcctaactatgtttttaaacttaaaaaggccctttatggtttaaagcaagcacccagatcttggtatgaatgattaagcaagtttctgcttgaacaatctttcacaagaggtcatgttgacaaaaccttgttcatcaaaaggcataagaatgatatcttattggttcaagtatatgttgatgatataatcttttggttcaactaaccatgtgctttgcaaggaattttctgcagctatgcaaaaagaatttgaaatgtcaatgatgggagaattaacattctttcttggacatcaagtgaagcgaatgaagaatggaacttttctcaaccaacctaagtattgccttgaagtgatcaaaaagtttgaaatggagaaatgtaaagatgctgcaactccaatgggaacatcaacctaccttgatttagatgaaaatggaaagagggttgatgagtcaaaattcagaggaatgattagatcattattatacttgacagctagtagaccagacataatgctaagtgtgtgcttgtgtgcaagatatcaagcaaatcccaaagagtctcatctaacaacagtcaaaagaattctcaaatatctcaaggctacacctaaagttggtctttggtatcccaaaggtgcttcaattaatattattggttattctgattctgactttgcaggatgtacgttagatagaaaaagcactagtggaacttgtcatctacttggaagttcattgatctcatgcattgcaagaaacaatcttgtgttgctttgtcaactgctgaagctgaatatatctcaactggaggttgctgtgcacaaagtctatggttaaagcaacaattacaagattttggagttgagttgaaagaaatacctttactatgtgacaacacaagtgctatcaacatttcaaagaatctaataatgcactcaaggaccaaacatattgagataagacatcattttctcagagatcatgtccaaaaaggtaatatcaaaattgatttcgttgacactaataatcaattggctaatatattactaaaccattggctagagatagattctatgctcttagaaacatgctaggaatcttggatgaatctaatctctgttagcttgaatgttgtgtgccttttcatgtgaaatgctttgtaaaattgaatccttcatcacaaaaacataaaatttccatgtcatgctgcataaatcctgttatttctgatacatgccgtgtaataatcgattaagtgttggattaattgattaaaatcattaaaatcatgattcagagtgaaaactgagcttatgtaatcaattacactaccagaataatcgattatttctcctttctgaaaattggtctcttctgtgataatcgattactcatcggattaatcgattacaatgaccaaaatctgttttccaaagtaaaaggtcactggaataatcgattacagtgaatggtaatcgattaaaatgttgaaaatcaattttttcaaaattcataaccttctagaataatcgattacatgtcggattaatcgattacacaagctaaaccgtgtttctgaaaatcaaacctctctgtgataatcgattaaatcatgaaataatcgattacacgttgtcttgtatctctgaatgcttgtaaaataatcgattacattatgaattaattgattactgtgtgtgctgttagtgtttctgcttctgaaataatcaattacacaaggaaaataatcgattatttatggagttactgcaaaatttgacagattttcttggaagttgtaactgcccaactcccacctaattcaaatttaaatcctctgcagtgagttaattcgttctaacagctattttattcagcctaaaaatctctataaatacagcctattgtgaaggaacaaatcacacctaatctctaccttctcttgctaaacctcttttcttctttattctgtgtgtttagaatcactgtctaggatgtctacctctaagagaaccaaaacttctacgagaaaggctggtgaaacttctaacccccctcctacaaataggttagatctttggttcactactgaaaaagatcgtatgacctatcttcagtttaatgccacaaaacaagtctgttcccctaaatatttagagctttattggttcattaggtaaggctttcaatttctttcctttttagaaacccagggtctaaggaagtttgtggagttaaagggtactttttaccctgaattggtcaaggtgttttacacctgtgccaagggatccatggatgggatattgaggtcccaagtaaatggagtgcctatggtaatcacccgtgaggtatgggaggcagttgctagtatctcctttgaaggagaaagaaattttgatgaaaatcctgagggttacaataaggtagagacctatagggagatgcttagtgatccccacatgagattgaaaactaggctaggtactagacccatgacccataaggataggcttctgcattatatcatcacatatatcctcacacctagagccacaaaccatgcccaagcaacggatgaagacctacagctagtgtatggtctgaagaattcaattcagatgaattggattctcattcttgaggagatcatgttgaaatccaaaaggctagtaaactacccattcccttatgttgtgcttgtgcctagatttatagactacttccaaattgatgtctcaaatgaagtagtggaccacacaaactcaagcaacagtctcatcaaagacaagcatctcaacaagctagggatggtgaagacaccacaaggatggtagatggctggtcaacaacctgtgcctgaacctcctgctgctgctggtgttggagaatatgctgaagaagatgaagaaagggatcatgcccaattcgagtcactcatgcttcagaaaatggatggcctaatctctataaatcatgattttaatgttgaaactagttcaactttagaagacattaaggctaggctagatgatattgaagctactcttatgtttgaagggtctgagtcattttagcctttgtaatttttttctgtttcttatgtttttatgctttcatgttttaattttaatttcaagaaatgtaatggttccctcacttattaatatatccatttatgtttcttttgttcaatatctgttgtgctttacatgtatttgactttgataagccaaatagggggagcaatgattgatttggttcatgctctgcagtatactttgttctactctgtttttctgcacaatttttgcccaaatcttattttgaatggattgtcaaattaagggggagctaagtgataaaagttaaccaattaagtaagatataaatgtaaatgaatgctggattaatcaacagattctttaacacttgttcttggcaaagagctggaattgttttcaggcttgcaatgctcaagtttttcctaactttggttccctcaattaacttcaagtccaacatataatcaatcaagaatttggcatgttcaatgcatcatgaagaatggaagactttgattcaagattggttttgagctttcaacatgcttggatgccttgaagttgtaattgattcaagtgtaagagaaaggctaatctgatgatccatgcattgcattcactcattcattcataaacttaaatggttttcataaagaataacaaagcttttatatttttgtttctgagtgaaaggtttttggaaaaatgttattttcactggtttaatcgattaccttaataatataatcatttattatgttcttcgttcaatctagaaaatctttatgaacattgtaatcgattacccatcagaataatcgattatttggcctttgtttataacaaaattgctttgttaatgattttaatcaattacttaagtgttgcaatcaatcacatagttaatcatggattttaagccttgctaggataatcggttaccattatctgtaatcgattacataggctatttgagaaaagtcactttcttgtcttaatcgattaccaaatcttgtaattgattacacgttcattttgaaaatataagtcatctgctttaatcgattaccaaatcttgtaatcgattacatagtgcattgtgttatcctgagacttctgtcttaatcaattacagctcaggacaatcgattattttgctcgttgctgaaacccagaaacattcttgaacagtttaatcgattatatggttattttaatcgattacataagcggattaatcgattatcaggcgtgtttaatcgattatagttagttacaaattctgttataaataggatttaaggcttggcttgttttctaactttgagagatatacccattcgtatttctgagctcacacaagtcttctaagcaattcctaagtaattttctcagtgtttttacttcttgcttcattcaaaacatcaataggtctttgaatgattcttgagcaagattcttttcaagattaaggaaaaacatgttctaatttagtttgctactcaacctgatttggtgattcaagtgcatttcattcattggatcatcaggttgtctctctccttaatctttgtgtgtaaatttggtactgaatttctgttgtatttggctattgtaaagtgggttcttcttgcttggttttagagaagggttctctaactcaagaacagagtaatgttctctggttctttcttcttagatttctaataggttttagatttctattctttatctagtgttgataaaggggaggtttttgtaaaagcttgtaagaacagaaatttataatagtggaactctaatctagtgttgattagaagaaactggatgtagctttagttttgaagtgaaccagtataaattgcttgtgtctttgattctatttctctatctctcgtcttattcattgatctttgattctttgattcatattcattgttcaataagttctattttgatctattgatttcttgggctgagacatttgattgagtaaaaagatttcttggttttgaaagtgataaagatcctaaactctgatttgaataagtttttaaaataccaaggttttaaccaattcaccccccctcttggttattgtgagtatttctattattttcaaatgcacattcttacaatttgagattttcattgatttttgaaaggcttctgaactaagagaaaattcaccgagtaacgaagctcttgtcttataattcaagattctcctgaatcattggtagaattatctttggacaagattttcaaaggagtttcttggagaactgatttgaaacttgctttctttcaacctaatcattgattggtaacatttgcatttgcattccttggatcataaggttttatctctcctctaaactctggttgtaattctttttacatttcagattgttaattgctattgcaaaagggttctttaagcttttctagagaagggttctctagagggaagaatagagaagggttctctatgtattgatctttagaagtctaaagggtgtttagatttcaattctttatccagggttgataaatggagatcattgtaagcttgtaaaaaatagattttgttgatagtggaactctaatcatagttgttgattagaagaaactggatgtagcttctcttttgaggggtgaaccaatataagctcttgtgttgataacattctttattctcttctagttatctcaatctgaaactatttgatgaaatctttattactcaacaagtaaaagtttctgtaattgttttcttgagctgagtggtttaattgattgaagaattcttggttttaagtgtgatacgatcttataactctgattcttacaaaattttaaaagccaagttttaaccaattcacccccctcttggttaactgtgtgtgctcatattgttttcagtgacaagtccatgcttacaaatttgactttaaaggatggaggatttgtcacctatggagacaacaataaaggaaaaataataggacaaggcaatattggtgacaactttaaaaccaaaatcaggaatgtactttatgtggaaggcctaaagcacaatcttctgagtataagtcaattgtttgataaaggattaaatgtatcctttaatgataattgctgcttaatatgtgatggtcaatctggtgaggttattcatgtatgaaaaagaaagggaaacatctaattgcttgctatagaacatgcattcattcataatattaatttcctagtaagtaagattgatgaatcacggctttggcataatgaacacaaatgatgtactttttttttaatttcttttgctgcaatattttctttcctttttttttnnnnnnnnnnnnnnnnnnnnnnnnnnnnnnnnnnnnnnnnnnnnnnnnnnnnnnnnnnnnnnnnnnnnnnnnnnnnnnnnnnnnnnnnnnnnnnnnnnnnnnnnnnnnnnnnnnnnnnnnnnnnnnnnnnnnnnnnnnnnnnnnnnnnnnnnnnnnnnnnnnnnnnnnnnnnnnnnnnnnnnnnnnnnnnnnnnnnnnnnnnnnnnnnnnnnnnnnnnnnnnnnnnnnnnnnnnnnnnnnnnnnnnnnnnnnnnnnnnnnnnnnnnnnnnnnnnnnnnnnnnnnnnnnnnnnnnnnnnnnnnnnnnnnnnnnnnnnnnnnnnnnnnnnnnnnnnnnnnnnnnnnnnnnnnnnnnnnnnnnnnnnnnnnnnnnnnnnnnnnnnnnnnnnnnnnnnnnnnnnnnnnnnnnnnnnnnnnnnnnnnnnnnnnnnnnnnnnnnnnnnnnnnnnnnnnnnnnnnnnnnnnnnnnnnnnnnnnnnnnnnnnnnnnnnnnnnnnnnnnnnnnnnnnnnnnnnnnnnnnnnnnnnnnnnnnnnnnnnnnnnnnnnnnnnnnnnnnnnnnnnnnnnnnnnnnnnnnnnnnnnnnnnnnnnnnnnnnnnnnnnnnnnnnnnnnnnnnnnnnnnnnnnnnnnnnnnnnnnnnnnnnnnnnnnnnnnnnnnnnnnnnnnnnnnnnnnnnnnnnnnnnnnnnnnnnnnnnnnnnnnnnnnnnnnnnnnnnnnnnnnnnnnnnnnnnnnnnnnnnnnnnnnnnnnnnnnnnnnnnnnnnnnnnnnnnnnnnnnnnnnnnnnnnnnnnnnnnnnnnnnnnnnnnnnnnnnnnnnnnnnnnnnnnnnnnnnnnnnnnnnnnnnnnnnnnnnnnnnnnnnnnnnnnnnnnnnnnnnnnnnnnnnnnnnnnnnnnnnnnnnnnnnnnnnnnnnnnnnnnnnnnnnnnnnnnnnnnnnnnnnnnnnnnnnnnnnnnnnnnnnnnnnnnnnnnnnnnnnnnnnnnnnnnnnnnnnnnnnnnnnnnnnnnnnnnnnnnnnnnnnnnnnnnnnnnnnnnnnnnnnnnnnnnnnnnnnnnnnnnnnnnnnnnnnnnnnnnnnnnnnactcaaaatgcttctaataatgaaatacgtaattttggaatgaagctttgaagttgcaacaactgagaataaaactggattaaaattcccaacaaaacaagcaaatatttaacactcaacaacaacttagccaaaatcacatggattgaaaggattgaagtttatgaacaatgatgaacatgggatgagctcccaaaacacaaatgcagaactttatcaactgaacaagaattgtagaaaatgacacgctaggaaattgaaagaataaattatgatcaaacacaaggttgtaacataattacacaattcaaaaagagcaaacaaaatttaggggtttagggttacccaaaaatgcaaaacatgatggatgaactcagccttatttccaaccctagaaccttgctctgaatagcaaatgatttaaatccctctaccttgattcaattcagaccaattctaggttggaattcacacaccaattaagcaagaaatgtatcgttagcttttatatgtttctcatcctatagaactcggattggaacggttccaaaacaaggtaaaagagaacgttctaaaatgtaatttagacacaagaaacattgaaaagggataagtaaaatgagaattatgcaaataagaaattcaggcaaaattatagaattagcaatgagaaaattaaacaaggaaacaaaaaatgtgaaaggaagaacaagataggtgccacaaacaatcatatttgataagccttgaggatcgccacaagaattgagcaattcttaataagatcaaatggttaaagaaagaaccctatcagagacaattctcatgcttcaatgataaaacccaacaaaagtcccttgtctattcacttcaaaaatgatttatacaaaatagctctcatgcacttggtagaaaataaatgaaaagtaaaatctcaacattgtaagcataactaaaatgccttagtggttaagtggggtataattaacttcctaagtcaataattgtcttctattattactccaagcaagcgatacatgtggctagcaacccacacatgcagacttctagatgttggtcccctcatgcaattggatttcccttagccactatatgttgtaaagcttcttgggtctttttagctcttgctcttgtaatgggctctcctatgctttgtattgggtcatgggcttccttctgggattgggtctagtctttgatgtcctcatcataaatatatccatattatcttgaataaaattgtcttgttcccttcattagttaccaattcattttgcattttttacaataatattttgaaaggaaatatatgttaacattaaatttcaaagcattacaattactttgattagttttaaagccatggtatgctcaattctcaataaatgccacaaagtgcagccaacaagatgatgttgcatttactcacaaaagtttacagcaatttatagataacccaatgccgcttaaaagcgccaagttaaatcaagttttactcatccatgaatgctagggcacgtgataccgtagggaatcaagttttgcatcatataatcaagcttagtctgataagttttaatgtttcatgacatcatgcatcatatcattgcattgcatctcgtctctggtaaatgtttcagcctgcggggcatttctaacctgtagtagagagttatcgagctcagtacctgcctggcatgatttaagaccaatacttagcacattttatcgttgtattcaatcccaatacctacctggcacactttactttcttttcaaatcctggaactagcatcgacatataacatcaaagcctagaaccaacactggcacataacatcacaacccagaaccagcatcgacacctgcatttaatctcaaaaccagcatcgacaccctgtgcctagaccgaaaccagcactggcaccaacatctaaatatgtgttggggagtttatagaatagaaccttatattcaaaggttttttttttcttctctttcatcactgtttgtgttacatacttgtagaaatatttcatgtaattccaatttatttgctgagcattcatccttttttttgttcgtttctaatttatcagcaataaatgacaaatgtatataaagttcacattgcctaatttttgtatggtcgcttatgtcttttttttttatcatttgttaatttttttattgttattggcattgatttcttatgcatgtattgtatcccacatgttttcttcttatggcattgtttcatatttttttaatcgtgtatgaatacctgttgcacatttggaaagtgtatcgatcgtacaagtaataaagtgataagaaagtatcatctccatgaggattgaggcactaacttattcgtaattattatctttaaattggaaagaataaaaataaagtaatttgtgttttgtgtttggaaattataataaaaatgaattaaatttaagaattgtaaatacgatatgaattaaagattatgcagtaatgaggaagaattgtggttaaagcacaataaccgctgatccctacttatgtaattgagttgataattaatttcacttactataattgctcaaagatatgccttatataattagttaaaccctaattcctcggtcattttaaccctttaatcctaatcaagaattataatcccttagcaaccccttttcagattaagctttaagttggcatactatgctttgcaatccttcatccttatccctaagtaatgtcgaactgttactttaccgctttcagaaactaaaaccccaatatccttattgtgaattctagcccttagaatccctaatagattgatcaagtctatcaatggcaatcagaattaaagaacaagataaagtgaaacaattataataaacttcattaatatcaattcaatccacacaagaattcacattggcttatggtctcaccacaatcaaagaggaattagccagacatgattatgtctagctcagtacaataatgataaggtagatgagaaagaatacaagaaggaagagtaatcaaacccctcaatcttggccttcttcttgatcttcctccgttctcgatttccttcaatgcctccttttcttgtttctgcctttgtattcgtccttgaaaacgtcctattgctttcctatttatagctaagtttgtaaaaccctaatatcttttcttcttatcctacctttaagctaattttgaattttccgtgtcgtccgcgcgactggcgccagtctggcgcgactagcgccagcttcaagtgaatgtggcgcgatccgcgcggcagtagcgcgattagcgccaacttgcagtggatgtgacgcgattggcatggtcctcgcactgatggcgcgagcttgcaggaacaattagctccttatcttgcttcttttcttccttttcttggctcctaatatccaaattgcatgaattagtaataaaatcaataataatgcaatttatatttattttggcctttatttgatattatatgcttaatttcctaataattttaacctaaaaactactatatgctagcagcatatcaaataattcccagatttagatattgttgtccttagcaataaacaaaaactttattgtcaaggaaactatattcaacactcaagcatatcatcacatacacaatctcacaactattctgtcaaatgtaattgaattccacatgaaaatttcaagaatacttgtcaagtctatcaatcatagaacatagcctggatacctcttaccaaggaatataaataactcatcactcaagtgttttgggtgaatataatctctcaattctccaaagcttataatattaccataagcttgattatattctcaagttcctgaaaatgagaaacatgaatacatgcatagtcaatcaaaaggtctttaaaaggttgtaatgtggcctggcttagggtaggaataatttggatagtggttaatttgagattgaagtatattagaactagtcaaatccacttaatcaacctcccgctcttattttcatgtccacctttgtacctctgcttccctttttgattcccctttatttttagttttgttttttttattggggaaatacatttaaatccaccaactggtatttcaaattcattatttctcactggactgctttctaagcttgggttctaccagatctttttctattgatacttcaaaaccaaacccagtattgtcttcttgggtaacttctttcttttctttcatgtggacattcatctttctatttctagtgaacttgacctaactctcctttcttccaatctcaaacaaggtagtcaaggataaaaggtttgaaggtgaatgaatggaaaaagcttaggctcaaaatggctaacaatggaaatcattttaaggtaaggtcatttagctctggcttaaaaagaaagaacatgcctttatcatatcaaccatgcaaatatcatagagaaacaaatcaagttctgaaatattcttaaaaatgaggtcactctgaaaagaatttatactgtataggctcaatcctcacaagctatggtatcaagctaatcttccattgacttcctatcaagtattctattcttttcacaatgtacttcaatcacaaaactacatagttttaatcatgtcatatgcaattctacgctctacttgtctcatacatatttccaaaacaattctcaatcaatcatcattcaatccaatttcatcactgcattggcaattccaaatctgaaaattagcataacatgctctaacattttattcacctaatcctaaaaagaacatatgaactaaactaatctattattcaaactaattcctaaactaactttctgatatcatctaaatgttttatttattatatatatatatatagtgaaatttttataatttaatctaagttctgttaaacatcaattgtttcttcaagtatgattcttcaaaaataacgcatgtgcgtcccattcccagattttaaacattgttgtccctagcaataagtttatattctaagaaaacacatctcgcgctggctttcagaaatcatccttggaaccaacatcaatctaacagaatgcatccataatttaaattacttgaattttaaattgttccacatgcaatgaaataaaattaactgaacataaaaatagaaaagcaattaaaatattgtctcattttctgaaagtccaggggacactcgtgatggttctgaatcctgtggctggtaaggagtgaagttaatgcagaagtgtctgcacaagtcttccatcattttgttctgatgttccaacagcctcttttgagccctcaattcagactggatctacaggtagcttggagaatcctcatagatcagttcgtgacgtgggcttctagtagtagtagaagaagatactcgtggtggtggtggtgctcgaacttcaggttgaggaatgttcgcacgaggactcctctcagcaatctcctcaggtgttaatttagaagctctaatcaactgctcctaccactgagtctctactgtagccagatatgtcttgtgtgtcatgacgaatggtatcttcatatccataggctcttcctctgagatctctaaacctgctttcctacaaagatgagaaataagtgaaaaatgggcaaggtgagatttactgctaccgtctttgattatatgcagtatcctatcagacaagatactggcaatgtgaagattgtcatcgcctagtagcacatgtaaaaggatggcccgttcaacattcacatctattaaattcgtagatggaatcacagtatggttgttaaattgatgccaaaattcagcctctctagtcagatcttgctttcataacttttcaggtacataatccaatccagatttacccttccaagcagtgtacagcccagtaatgcctcttagaatctcctctgcaatttgaggcatatcctctctataaacactcttacttgttataggcttcatcctgttaaaagtcctaatgaaagcacaagcttgaaggctatattaactagttcccaaaaattcttcaattgtctcatggtcaaatggaacttctatgcctctaacccaactaactctttctctctctgtaacaccccaatattttcatgattgcaaatacatgttgaatgaaatatttgtgcaattattcaagtaaatattaaagttgtgtgaaattttattaagtttaaatagaactaaattgtgtgaaatattaattagcaatgttgggagaataatgaccatatcatcctttccttaaaatagaaattacaagaatgcccttagggtgacaattacacaaatacccttggccatttttagaaatgacgatcatacccctaggataaataatgaaattaccataatgcccttcaggccagaaatgaccagatatccttagagattttgtggaaacctaatgaaattataagagtactattggatggcagagtatcaaaatagtttgtgacaagaaactctagaatagaatttctataaattttataaggtgacaactttgaaaccttattcagaaaaattcaagcattataaaaatatagaaaaatgataaatagaatctatagaattttctctaaattgtaggatgtatagatttatttaataaaatggtttagtaattttgatgatcaaagaatagtacagaccaataaaaattaagataagagcagtttatatgaaagattgtacatcactctatacaaaaactgcttgtgagtaatttaaactgtcattgaagttaatttctggggatctctagagttctattatttcatattatctttagataagaagaattcaaaacaaacttgatttcctacaagaaaatgccatatggaaaaacataattcgaattagatttttctttatcacaaaaaaaaatgacatatgtacataaaatggcataaaaggaagaaaaacttgtcttccttcccctttagcatgaaattcacgtgaagaagagtgtggagaggagtagaagtttcatgaatgccacttggaacggcaagctccatgatgaagacaagtggtaggacacttgtatggcatatgatgaacctagaagattttttttttataaagtaaaggaatcatcatgaatttagttagaatctaatggaacaagaggaactaagtaggaaactaagttagaagggaactaaatgaaggaaactagttaagaagggcaaaaatgtccttgaatattaaatcatttcctaaacactataggaagaatcacgtgtaaagctaggtgcctttaggaagaactttgacaagctttataagaagaaaacaaggtatgtatagggaagattatgctaaatatagtttaagtattgtttttgttcaaataagtatatatagaatctcatttatttctatggaaaacaaagcttgcacaccatgtgtttgatgaaatgcttcaaagaaataaagatagtttgactgttgttttattcaaatagatgcttgaagttcatgtgttgttgagtgtttctatgaatttctatgaaattcaggtgttgcttagtgtttcatgaatctttacgaacttcatatgtttccatgaatttctacacaagttgagttctgtacttgaattctgttgaatttctgagtaaactatgtgagattgaaattgaagactggtgcgtaaaataaatatgagatgataaagaattatacattaaagtgaatcagtcttatatgtctcatatgcatatgcccggcgggggttaatccgcgttatttgcctcaagatgaggtatgtcagatagctgaaagaattgagatcgagcgttcagacaaaaggagtctgagctggggggtagctggcagtggggagaacacgccacccatgatgatcacatgaagtgtgggtgggagtcctgttgcaacattgcgataccctgactgatcgttccaattccgtgccactgggatggggctatcttgactgttggtaccatatgataaaaagagaatcttgcatcatgataagagtctaaaagaatcatgcatcatctaatcttgagaatattgttatgattatctatgtataatatatatattctgttgcttaaattatgtttatcgtaaacttaccctgtatttttgtgtctgtggttgacacctgccatgacctcaatttaattgggcgagcagatgaacagtaagagattggcaagctgattactgaagacatggactttgttgaagatgtttgattgaagatgttttgttatgatgaaatatttgagttgtttgtaatatgtaatagaacaaatatcggactgtattgtattttatattacaccgaacctttaaatattaattagtgacgaaaccttttgaaatcggtcattagtaaaccttagtttgctattttatttacaagagaaaaagtattttcattaaaaattaatacaacataaaatgggaatttgaggcgttacaatagtggtatcagagcatgtttgttccttaggactgtgtgttatgtgtttgttgtgtttctctgcaatatgtttgtgttatatgttctatgtattttgctatgaaccatggactgtgttttctgtaatatgctttttggaatagagaagcatgaggtcatgatcatagaaaggaaactttatacaagaaggactattatatattatgggacgaaaaaaccaaataatattttggtataccatgtatagtattaccaagatatagtagtagaagaagcaagctaggcttcaatctctagttaagaaattatttggactaatttatatgcttaatttgggcaagatttatggttatcatttaggcttaagattcatgtaatttgatggttattttctgataagaacatgttgattttaaccataagataggtgatgatctataagttggaatattaatgatgttggagttacatttgatgatctttggagagtggttttgatgacatttggaatgttttgtcatatttttactatgggactattttgcattaatttctagaagtagaggatgaatggtatgtagataaatggtttaaatactagagtgattcaattttgaggattaagtagtgaggtggtaggtgaaaggagaattaagatacatgctaggtttaaatcttttcttgtgaaagtttaaagggattagaaattatttgaaagataaattgtggattattagttagattactaatatgattttctgttgcttgaggatattctatggtcgtgcctaaattggtaatgatcttacttgaataaggtatgatggtttaaccttacttgtggtacgtatgatgttatgataaaaatatttttccataaggtgatcggtattttgcttatggattatggagatttgatgatgctgttataatatgtttgtattcctgatgtctgttataccataagttagcaaactggccacctggataaattttcaaggcatcaactctctatagtgattaagtgagtgtagaattgtattgtttgttgtgggtatctctttcatgttttcacttggtgtgtgtaaggagtgataaatagtaagaataactgtacaatagctaatatttttccaagctttgaggctgaaggtcaagttgtgacttgggaaacctttaagagggtatttttggagaaatattttcctgagaatgttagaaataagaaagtgatggaattcttatagcataagcaagggattatgactgtggctaagtttgaagaatcggtgaagtactatcccctttatcaagggaaatatagtattatgttactgtgttattcgactccggtgtgacccattcttttatattttatttgtgagtagagaaacttaaactttttatgtcttctttgaatgatgagcttgtggttgagaccccaactagtgggtatgttttgatttctgatgtgtgtttgaattgttttgtggagatttctgatagaaaatttttgtgttgatctgatctgtttgcctcttagccaaattgatgttattctaggtatggattggttatcttccaaccatgttctgctgaattgttttaaaacgttggtgttcggtaatcctgaaatgagtgataatgagatatctatctttatcaaccaaattttgtcatctttgagagaaaagatcaagtatgcatgatattgtctaatctaaaagtggagaacaaggtttctctaggtgacctccttgttgttggagaatttccagaagtgtttcctaaggatatatctggttttgtaacgacctaaacattatactagatattattaatattattattattaggattaaattattaagaaacgtatattttattaattttaaaacgtataacttacaaaagatttgaaactaatgtagctacagtccttattacaaaagtcaatattaaacaagtacaagctttttccaaaacaaaagcctacttcatatcttcatttctactccgtcaccaacccaggtcatcaaggaaattgacccttgttgccatctaaaaaaaaatgaaaacaaatctagtgagaaataaaatctctcagtaggcaaaatctaaaccaccaaacacgttagtacgttagtaaatcttcaatataaccaaataaattcacacaagaattatgtagctatatgaatgcatgaaatgaagtttttccaggatgcacatggcctctacatatcgtactgtatgtagctacacctcgtattggatgtagacgttgcgatcgtcttacgcaaacatgcatgatttctgtcatatatgtgcacctggtcactacatatcgtactatatgtagtatcagattctgtttcacaaaatcccgtactggatttggaaacacgaatcaacatatcatcatatcaaatccatcaataacaaaatccatgagcaaatacacacaacctcatggaaaaatttatatcacaacatcatacgtatccaaaagtatggtttaaactatcatgccttattcaagtaaaaattataccaacttaggcatgacaattgaatatcctcaagctaaaaaaaaaatcatgttagtaatctaactaataaaccacaatatatctttcaaataatttataattcctttaaactttcacgagaaaagattaaaacctagcatgcatcttaatctcctttcacctaccaccttgctacgtcatcctcaaatttaatcacttaagcatttgaaccatttaactacataccattcaacctctacttctaaaaattaattaaaaacagtcccataataaaaatatgaacaaacagcccaaaggtcataaattcacttccaaaaatcatcaaaggtgattccaaatatcactaatatttcaacctataaatcatcacctatcctatggttaaaataaacatttccatttcgtaaaataaccttcaaataacatgaatttccaacttaaacaataaccataaatctgcccaattaagcatataagttaatccaaacaaatgcttaactagatattgaagcctagcctacctcgagtttgagtcttgaaaatggaatggaataatggctgccttccttgggaaatcctctaagaaatgaagccttgatatccttctactatgcttgtcaaactcttcctaaggttgcttgccttacacgtgatttcttcaaggtggtggggtttctttcttacttgatttaagctttaaagggaaagatgaaataaaatgaaggtggtgtgagggagagagcttcacatgaagtatgtagggagaaagtcttgaaaaatggcttgcacttaaggtcccccctccctttatatagtgtttagaaaatgatataatattcaaggacatttttgcccttcctaacttaattaccttcatttagttccatcctaacttaattaattttcattcctttagattctaactaagttcattatgattcctttactttataagaaaaatcttctaagttcaatatgtaccttacaagtgtcctaacacttgtcttcatcataaagcttgcctttacaagtgtcctacttacttggcattgcctttacaagtgtcccaccacttgtcccattcatgaagtttctcctatcttctccatgtttcacatgaatactagaggaagggagaaaaatatttgcttcatttcatgttatcttgtatccatattattcaaggcatgacacctttcttccaagtgtcctttttcttggcatgttcatgaaacttctctcattttctacctaattcacatgattaaccaaagccaaagggaaacgaagacaaattttacttccttttatgctattttatgtacacatgtcatttttgatgatgaagaaaaatctaatcccaatatggcttcatacatggcattttctagtaggaagtcaagtttgatttgaactcttcttcctaaagataatattgaataatagcattctaaagtttttcaaaaactgacttcaatttcagtaaaaattgctcacaagtagtctatacagagtactactcaaacttttcttacaatactgtttttatcttaattctgattggtctatactacttttgacaataaaaattactaaaccattttattaaataagtctattcatcctacaattaagagaaaatcccatagattttatttatcattttttcctatttttctaatgcttgaattctttggaataaaatttcaaagttattaccttataaaattcttagaaattctattctaggattttttgtcacaaagtattttggtaatctgtcatttaagagtgctctgtaatttcatcaagttttcacaaaatctctaagggtgtctaggcaattttagcttcaagggtattatggtaatttgacactctagcggcatgattgtaatttcccaaaatatccaagggtatttttgtaatttccaccttaaaatatctaacaaaaatatccaggggtatttatgtaattttcatctcaaaggcatttttgtaatttctgttttaaggaaagagtgatatagtcatttctctttaaatatgtttacatccaagtatcatcacatgtccacaaattaattataactgtgaataaaattttgaggatgttacatttactacctgagagagagataaagttttctatagatttgctacctggcactggacccatgtccatagcccttataggatgtctcctatagagttagttgagcttaagaaacaactaggagagttgttgaataagtagtttgtgagatctaatgtgtttccatagggagcaccagtgttgctagtaaagaagaaaggtaggaccatgaggttgtgtgtagactatcattagttggataaggtgacgattaaaaataagtatctttttcctagaatagatgaccttatggatcagttggtaggagcatgtgtgtttagtaagatagaccttaggtcaggttatcatcagatccatgtgaagtctgaggatgtttcgaagactgcctttaggacctgcatggtcactacgagtatttagttatgcccttcaatgtgactaatgcccctggcgtgtttatggattatatgaataggatctttcaaccttatcttgatagttttgtgaaagtattcatagatgatattttggtatattctaagactagagaggagaatgaggagcatttgaggattgtgctacagtcccttaagtatcgacaactttatgctaagttgtccaagagtgagttttggttagagaaattgactttcttaggacatatgatattccaaggtggtatagctgtagatccttctaaggtaaaagttgttctaaagtgggaaagtcctaagtctgtgtttgagattagaagtttttttgggtttagcaggatattatcagagaatcatagaaggtttctccgagttagccttacctttgaccaagctgactcgtaatggtcaagcttttgtgtgggatgcctagtgtgagcatagtttccaaacccttaaggaaaaactgatgacaacacctgtgttagttttgcctaatcttagacaacccttcgaggtgtattgtgatgcatcaaagatgagttaggagcaatgttgatgtgaagaatggccaagtagtggcctatgcttttagacaactcaaaacgcatgaaaggaactaccctattcatgatttagagatagcagccgtggtgtttacactaaaaatttggagacactatctgtatggctctcattttgaggtttttagtgatcataagagtttgaaatatttgtttagtcaaaaagaattaaatatgaggcaggggagatggatggaatttttgaaagattatgattttgagcttagttatcatcctggaaaagccaatatggtggcggatgctttaagtaggaaatctttaatgatatctgcattgatgattagggaaatggatctgttaaaatagtttagggatcttagtttaatgtgtgaaactacacctgcaagtgtgaagttaggagctctgcaagtttccaatgagtttctaaatgaaataggaagtaagcaaaaatctgatccttttatatgaaccatattagaaaatatatccaatggagggaatagtgaatttaagataggaacagatggtatattgagattaatgaagaatttgtgtgcctaatgaacctgaaattaagaaaataattttggaggaaggacacaagagtaagttgagtatccatccagaagccactaaaatgtatcaaaatctaaaaagttttgttctggtggtcaaggatgaagaaggaaataagtgagtatgtatattcttgtttagttttgtcagaaatccaagatagaacatcagaaaccttctagtatgttacaatctttagagatacctcattaaaatgggataacatatccatggactttgttaccgctttactcaagagttctaaaggttttgattccatataggttataatagatcggctaactaagtctgttcattttattcccattaacatcaggtattctttagaaaaactgacaagtttgtacataagtgagattgtgagattgcatggagttccatctaatgttgtatctgatagagatcctagatttacatccagatttttggaaaagtttacatagagctctgggaaccaagttcaaactaagttcaacttaccatcctcaaactgatggacaaactgaacgaaccattcaatctttagaagacttgttgagagcttgtgttttagaacacaaaggaaactggggagattttctgcctttaatagaatttacctacaacaatagttttcattcctctattggtatggcaccatatgagactttgtacggtagaaaatgtagaactgttctgtgctagatggagtcgggagaaaacttaattttaggtccagaaattatacaacaaattacagacaaaattaagttgattcaggaaaagatgaaagctgctcaaaacaggcaaaagagctatcacgatcagaggagaaaagatttagagtttgatgtgggagatcatgtattcttaagagtaaatccttggactggagttgggagagctctaaaatcccgaaagctcacaccacgttttggtggacctttccagattattaaaagagtcggacctgtagcttaccaaattgcattacccccaaaactttcaaatcttcatgatgtttttcacatatctcaattacgtaagtatattcacaatccttcacaatgtgactgagttagatgatgtaccaatcaaggataatttaacttatgaaacattaccggtgagaattgaggatagaaggatcaaagttctaagaggaaaagaaatttctttagtaaaggtaatctggggaaacagtgcaaatggtgatgctacttgggaactggaaaatgagatgcgaaagagttatccgacactttgaatcaggtaaatttcgaggacgaaatttttgtagagggggagaattgtaacaccccaatattttcatgattgcaaatagatgttgaatgaaatatttgtgcaattattcaagtaaatattagttgtgtgaaattttattaagtttaaatagaacaaaattgtgtgaaatattaattagcaatgttgggagaataatgaccatatcatcctttccttaaaatagaaattacaagaatgcccttagggtgacaattacacaaatacccttgaacatttttagaaatgacgatcatacccctaggatgaataatgaaattaccataatgcccttcaagccagaaatgaccagatatccttaaagattttgtggaaacctgatgaaattataagagtactattggatggcagagtatcaaaatagtttgtgacaagaaactctagaatagaatttctataaattttataaggtgacaactttgaaaccttatttagaaaaattcaagcattagaaaaatatagaaaaatgataaatagaatctatagaattttctctaaattgtaggatgtatagatttatttaataaaatggtttagtaattttgatgatcaaagaatagtacagaccaataaaaattaagataaaagctgtttatatgaaagattgtacatcactctatacaaaaactgcttgtgagtaatttaaactgtcattgaagttaatatctggggatctctagagttctattatttcatattatctttagataagaagaattcaaaacaaacttgatttcctacaagaaaatgccatatggaaaaacataattggaattagatttttctttaccataaaaaaaatgacatatgtacataaaatggcataaaaggaagaaaaacttgtcttccttcccctttagcatgaaattcacgtgaagaagagtgtggagaggagtagaagtttcatgaatgccacttggaaaggcaagctctatgatgaagacaagtggtaggacacttgtatggcatatgatgaacctagaagatttttttttttttataaagtaaaggaatcgtcatgaatttagttagaatctaatggaacaagaggaatgatgagtcactatttacatttattttctcacctttctgtactcattttaatccctgatttgtgtttaatcgtttatattccgcactgtttctcatttaggatttaattggaccgataattcagattttaactaatttggatttttttaagtttaattattccaatttttattttcagggcagtttaataattaaatgggcttggaattaattcatggacttgaagattgaagtgccacgtcagcatcattttccacatcagcattttattttcgttttattttgctttagtgaatttttgggccgaaattgttaggaaaggcccattttttgttggaggttagacactagtatttatagaatactgtgcccatgcaaaaaagaggatattcacgctcagctctctttagggttttaggttttcgtttctgttggttattctgcttagggtttcgtttttgtttggattttctgtttcggaatacggttgcgtttcaatttcagtgcttatttcgtttctgcttcaagtgtctaatcttgttttctgctttcagtattctggttttcgtttctgttcagtttcgtttttgcatttgaattttgtttctcttctagtttcgtttaatgttcggctgctattcaattcgtgtttctgttgcaattttcgaattaatggaaggctaaatcttagggttggaccctaggacagattgcaaacctttaatggaggttctctgtacttgtaattctgttctgcttggttcttccttgttgggtctctgttctgtatctttttcgaattagagtcatgcttaatgattctgagttgattgattcagtaatctcaggttgcttaatcctgagagattaggcttgacgaggttcgcgttttcttaattcgtgtagggaagttttaggttaatcttcgcttggtagattaatctggactaacaaggattaagttaggatagattatctttcgtgaaccgaggatattagaggcgcaatctgttcaaaggtctgacttgtttaatcactgcaattatttagtatttctgttttattttatatactcttgcattctgttagaaccccccttacacgtttaatcccttaacacagacaattgatcctagagagacgacctaggagtcacttcctagtactgcatttaattgtattaatttgaccgagtacgacctcgaccaaggaactaagtaggaaactaagttagaagggaactaaatgaaggaaattagttaagaagggctaaaatgtccttgaatattaaatcatttcctaaacactatataaaggggggagggggacctaaaatgcaagtcattttccaagcttcctctacataaccttcacatgaatatcctccctcatatcactctcatcctttcattttccaagctaagattaagtaagaaagaaaccctaccatcttgaagaatcacgtgtaaagctaggtgcctttaggaagaagtttgacaagctttataagaagaaaacaaggtatatatagggaagattatgctaaatatagtttaagtattgtttttgttcagataagtatatatagaatcccatttatttctatggaaaacaaagcttacacaccatgtgtttgatgaaatgcttcaaagaaataaagatagtttgactgttgttttattcaaatagatgcttgaagttcatgtgttgttgagtgtttctatgaatttctatgaaattcaggtgttgcttagtgtttcatgaatctttacgaacttcatatgtttccatgaatttctacacaagttgagttctgtacttgaattctgttgaatttctgagtaaactatgtgagatagaaattgaagactgatgcataaaataaatatgagatgataaagaattatacattaaagtgaatcagtcttatatgtctcatatgcatattgtaacaccccaaatttttacagtcgattgatagtttgtattcaaattattagggtaaaatattgatcagaggcagtataaaaagatttgagggaaatgacgcaaatacccctgaatatttttgaaaatgaccaaactggccctaggtattttggcaaagtatcttcaggaggaaattctataaatactctgggatgttagaaaaataatcagaatacccttagggtgacaattacagagattccttgaacattttaggaaatgacgattttgcccctagggaaagtggtgaaattaccaaaataccctttaggtcaaacaaggaccagatgaccttagaaatttatgaaaacctcagtattggataaaatacttttagataacaaattatcagcaagattgagggcagagaaccctaaaatagaatttctacgaattttggaagataggctaaaaagagcttaatctggactacttcaagtatagaaaattataaaaagagtatggacataatctatagagttttctcttaattgtggaaagaaaaggtttcttcaatgagttagtttagtaattttaataattcaaggcaacatggaccaataagaaattagaattttgctattataggtaataaaggaaaattggatttatttggatttctaaattaagccttgaccgtatgatgcaagatcaatggagaaaaacgttaagaaacttcaagaatggacacatggatggttaagaggctaggatacatgccattggtccatttgtagagtaaggtaataatgaattaagaagatttttttctaaatacatttcctcttgactcctttggacccgtagacagttctaagcattatttcaaaaatcccaacggtcaaaagttagatatgtaagataggagtatgtctttaaaatgttaagaagatccaacggttaacaagttcagaatgaatatttttgtaacacgggttttgggcagaaatttttatgactaagtctaagctacccacgattttggaataaaaatcaaagagaatgcacttagctggagtaggccacgtgaaagcaagcaaaagtgtggaattctaatgaagcaagacacttgtaaggtccaaaatccttagccaataaaaggagaacaaccaataagcaaggtaatgatggacttggaagatttttgtagaaaaaacaaagctaaatcctcctataaaaaggggatgaaaactgaaattttggggctgtccaagaggaggttcatccgtgcaaaaacatcatcccaaagccttcattctattctttttctaattcaccttttaccaaaatacaaaacacaaaggcctataccttggaatctcacgtgaagtactagccaatttaggagcaaagatcattcaaaattcaaaggaggagggctgtccaaaaagcttaggaaaccaaggtatggggagtttatgttgagcctagtttgaataataatccttgtttgattttattttgctttgtagactaggtgtttgataaaatgtctcaaagagcttgaataactatttgtctaagaaacttgattctaaattaaataactaatggttggatgaataacttgaactaaatttaataaagaagaataagaagtaaccgaacattagtggtagaatgattatcttaaataaattagttgtttaggattatggttagttaatggaataattttactataaatctaatgttggttgaaattctcctatgttgttctagggatatttatatttagtttgacactagaacttggatgagaatatgtttatgttgaactttatgaagatccatgtttatatagctttcttttaacgagtattctatattgcacatcatgtgtttgatagtttgtcacaatgaataaaagatgtttaagtgttatggatttgaacctttattgctaggtatgtagtatacttgcatgattgaatgttttaaagaaatgactatgtgtttttacatgtgttgttgagtgtttccataaaagcacaccaagtgtttgataaaaggtttcaaagaaataaaagaagttatgtgatctttcataagttgttgagtaactctatatactttaaaattaacatgttgcttggtggtttatgattttgatgttgagaaataaattagattttgatgttgagaaacaaattaagaattgtgttaatgatggaataattggaatcctcatgttgtatggtgattatttattagagctgtggctgtatgatgagactgtggtgtaaaattctatgatggtggaaataagctttatgtgttgttctaaaaacatctgccacgagctgtaaagatgtttaaagacttaataaaatgaatcattcatgcatttcatacgcatatgccttgcgggggttaatccgtggagttgtttgtcagatagctaaaccgagtccatgcgttcagagattgaactggggggtagtgtgtttcagggaggaccacaccaccatgatgatcacataggtggaggtgacattcctacgcgcccctgccctaccccgactgaatggataggtgtgccactgggatggggctatcttgactgtggccactgttgatgatttaataacctaagatctcagtcatgcatcatataaaaagatgagcatgcatcttatgcatcacatagttgggtatctgtatgaggatctatatactgtataagttgtgtggtctttttatgattaagattttatccatctgtgcttatatatattattcaaactatgtttgtcataaacttacccgagttgtgcctgtggttgacacctgtgatgaccccaattcatttgggcgagcagaggaacaggaaagcatgagctgtaaatgaagattgttgaagaagttttgatgaactgtttgctgtaatttgtaatttcatatggcatgtaatttgtaatagacagtctgtgtattattttggataactgactttggactgtatcatggactgtattcttattatatgaaccgtagtaaggaaaatcgtttacgctatttacgaatcataaaattagcaatgcaaaaagaattttcttgaaaaatttataaccaatctaattttaataccaagtggacacgagtttttaattaaaatcaatcaagcacgagagagtcaagagaggcgttacaatggtggtatcagagctatggtttgttttatgaggactgtatgcttactatgtcactatgtgtgtgtgatgttttgcatgttatgtgtttctaaagtgtttgctatgtgctgtatgtgtttgatgcatctctaagaactctgtgttttgtaggctgatctaagctaaaccatggattgggttttctgtgatatgcttttaaaggattaaggttttaatctgcagttgagaaatttcttgaattaacctaattgagattatttgaacacgtgatttgattaatgaacgcttggttgaataaataacttgaaataagcctaatgggtaaatgctaagtaacttgaatatatatgtgttatgactatttgatttaaaatcatggactgttttgttaaagtttagatgttgtattaaaatttaagtgttttaagtatttcataaatctttgagcttatttaagttaggattggaagcatgcttattctataaagattgatgttaaccatagtttataaatagcttaatcggtaaagattttaatagtttagaattataactatttaatagaatttgttgctacaattttaatgattggccgaaatttttaagtatctatatttaatttgaggataaaattaattggaaatataactatttagaaattaagtataagttttagttcaagacttttaggaaataaagttgcttatcatatgattagtaaaacgaattcaaaaaggactgagatggtttaagtgttgaatgaaatgtttgtaaacatgtgtggttgagtgtttctataaaaacttataaaggtcatgtgttgcttaaggatttgtgaaacattttgggtgttgtatgaattgtaaagaaatgagttgagttgtatattaacttgatgttaagaaaatggttaattggaattataatggaaggcttcaccaaaaaaatttatgtgttttgatgttctataatctttgagcatggtctgttttctaggactgtgtttaccatgactttgtgtttctgtgtggttgctatgtttttgtgtgttgtagggttgttgtatttctttgccaaatgttctacgtatgatatggtttgtatgtttctaggaaccatggattgagtttttgtgaaatgttttagaaaaagtagattaggctgtaggtttcaatctacaattaagaagcttcttggattaaaatggctgaaaaagacttacaattatagattaagacttgaaattcatgatataggatggttattttatattgaggaaatgttgatcataagataggtgatgatctatgagttagaaaattaataatgttagagttaaattgaatgattttagaaaagaggtttagggagttttgacgataattggaaggtttggccatattttatgaataatttgagtttatcagtaaaggatgaatggcatattggtttaagtattggaataattcaattttaaggattaagtagtcaagtggtaggagaaaagaaaattaagatgaatattagaattaaattttcttgagaaggttcgaaggaatcaaaattatttgaaaaaaaaaattgtggattattagttgtgctactaacataattttctgtgttgaggatatttgcaagttggacataagtacatttggataaggtacggtaatttaattttatagtacgtaggtggtatgaaatattttcttaaaaggattagtattttacttatggagtatggattttgaagattgaatgatatgttagaacaagtttatagttctgatgactgttataccataagtttcaatgtatattcataagttagcagactggccacctggataacttgtgaattgcaaagaaacattatgtcaagcagacataaatataagtaaataattgataggtgattttctaggtatccattttttgtttagagatttagtaagtgtagggatagatatgtttcttgatgaatgaacgaaataaggattagtaagaatgattgtcgtatagttgatgtttgtcaaagtgttgaggctgaaggataagttgtgatttggggaaattttaaaaggttatattagaaaaaatattttaaggatgttagaaataagaaagtgatagaattgagcaagggattatgagtatggttgagtctatggctaagtctgagtaattagtaaagtattttttcattattaaagaaaatatgatatagaggtactggtgttatttgatttaagtgtgatcattccaattccattttacttgtgagtagaaaaaattaaatttttaggtgtctttcatgaatgataagtttgtgataccgtaaccagtaaagtatgttttgatttctaataagagctttgtattgtggaaatatatgatagaaaattttatgttgatctaatttgcttgcctcttagctaagctgatgttatcttttgatgaattgttttaaataattagtgtctaagataggttgtttatttctgctaactaattttataatccctaagagaaagagtaagaatatatgatattgtctaatctgaaagtagaaaccacggtttctaggtgaggatctattactgtataagttgtgtggtctttttatgattaagattttatccatttgtgcttatatatattattcaaactatgtttgtcataaacttacccgagttgtgtctgtggttgacacctgtgatgaccccaattcatttgggcgagcagaggaacaggaaagcatgagctgtaaatgaagattgttgaagaagttttgatgaactgtttgctgtaatttgtaatttcatatggcatgtaatttgtaatagacagtctgtgtattattttggataactgactttgactgtatcatggactgtattcttattatatgaaccgtagtaaggaaaatcgtttacgctatttacgaatcataaaattagcaatgcaaaaagaattttcgtgaaaaatttataaccaatctaattttaataccaagtggacacgagtttttaattaaaatcaatcaagcacgagagagtcaagagaggcgttacacatatgcccggcgggggttaatccgcgttatttgcctcaagaggaggtatgtcagatagctgaaagaattgagatcgagcgttcagacaaaaggagtctgagctggggggtagctggcagtggggagaacacgccacccatgatgatcacatgaagtgtgggtgggagtcctattgcaacactgcgataccctgactgatcgttccaattccgtgccactgggatggggctatcttgactgttggtaccatatgataaaaagagaatcatgcatcatgataagagtctaaaagaatcatgcatcatctaatctagagaatattgttatgattatctatgtataatatatatattctgttgcttaaattatgtttatcgtaaacttaccctgtatttttgtgtctgtggttgacacctgctatgacctcaatttaattgggcgagcagatgaatagtaaaagattggcaagctgattactgaagacatggactttgttgaagatgtttgattgaagatgttttgttatgatgaaatatttgagttgtttgtaatatgtaatagaacaaatatcggactgtattgtattttatattacaccgaacctttaaatattaattagtgacgaaaccttttgaaatcggtcattagtaaaccttagtttgctattttagttacaagagaaaaagtattttctttaaaaattaatacaacataaaatgggaatttgaggtgttacactctccacagtttgtctatccacgtttgccaagaactctttcaggatggtactggaacttggttcaagaaaacttaccaaggtctgccaatctctcctagtgatcacctccaagataggtgaatcctcaggtagagattcccagtcgatccttttctccggaattattttcttcggagcataccagttctcatatctttgttgacattcaatggcacggaaacacgtctcatcatattcagtggttcttgccctcttgctaccggatgtagcgcccttcttcttgtttccttggtccacttgctttccctgaaactcagaaatttcccagacatatatgcaatgaattcccagattgctggcaatcatatctcaaccatttctttatttcaggtaaacaaccagaaactagcatcatatagaatcgacatgcataaattgaacaagcatttgataattaatctccaaatcaatccttcccaataattcccaaatttatttggttctatatgacttaattatgaatttagaaggtatactaggcatcctcttattgttgtaattggggaataaagtccttaagatagaaataaaatcttaagaacacacaatagtcattcccagattttatttccaatttttacgccttaaatttcactgaaaagctacctacaattcaaatcttccacacaactctaatctattcattcaaaatccaatagcatttaattatttaattcaaaattcttatgttcttagaacatacttttcatgctattcttgatttatagactagaagcttgatcaagcatatcaacaatctttgcaatcatttaaacacaaaaagaataatccttaaattcacagctggcgcggatggcaccacagttcacgtggtttgcgtgaacttacagaagtactagcgcggttagcgctgctgccacgcgagtcgcgcgggctgcaaaatcaaggttctccaaaacatgaattgtatgttccctaacctctagcagtcaacccagaatcaatcctaactagatgttttctactctaaaccaaaagagtataaaatacaaggatggaaaataagaatgcgtaccttatctttagccatttggaagaacttatcaagaacaagaaatatagacttccaactgtttgctcagaaatttcaatgatatgaaataggaacaagataaaccatcccttgtatttatagactttagaatagaaagaagttaatgggagttatttcaaaatgtaactgaaatgcaagttaatagcaattatggcttggcaacgtttgaaactgaagatccatggcttttggctactgagggaataagaacttttaccaaaataaggtttcaaattttaaatttaaaaactaccctcgaagtgtcacatgaatcgcgtcatgactcgtgcgttttgcgctgtcccacagaacttctggcgcgaatcgcttcattcccacgcgatcagcgtgaacctacagaacatatggcgcgagtggcgccaagttcgctcgatccgcgtgaattcaaaaaaatttttttgaaacaaatgaagtataactttaaaatccttggattgccttccaagtagcgcttgtttaatgtcacgagcctgacaccgacctctttaattttcaggtaaattaagtggtatggaaatagtattcatttccacttcccctccatgatagatttttaacctccacccattaactttaaatgatctgtcagagttctgaggagatatttcaattgtcccatacggaaaaacttttttaacaatgaagggaccagaccaacgggatttaagtttacttgggaataatctcagtcgagaattatataacaatacttgttgtcccagcgtaaactcctttggatgaatctttcctgtcatgccacctttttgtcttttctttataaattttagcattttcataagcatctaacctaaactcatcaggctcatttaactgtaatagtcttttatcataagcttcagataattcaaagttaagaaacttagtagcccacagggctttatgctctaattcaataggaaggtggcaagacttaccatagactaattgaaatggcgacatacctattggcgttttgaaagttgttctgtatgcccagagtacatcctccaacttcattgcccagtcttttctggaatttccaacagttttctcaagaattctttttagttctctattagaaatttccacttgcccacttgtttgaggatggtatggtgtagccactctatgagtcaccccatatttggtaagcaatgttgtaaactgtttattgcagaagtgagtgcctccatcacttatgatggctcttggtactccaaaacgagtgaatatattctttcacaagaaagatacaaccactcttgcatcatttgtaggcaaagccacagcttctacccatttagacacatagtctatagctaccaatatatattgattggaatatgatttagggaaaggtcccataaaatcgattccccagacatcaaacaattccacttcttgaatgttattaagtggcatttcatcctttcgggatatgttaccagttctttggcaattatcacattttcccacaaaatccctagaatctttaaaaagtgtgggccaataatacccactttgctatactttatgcgctgttctattccctccaaaatgtcctccataatttgaagaatgacagtgccaaagaatctttggcacttctgattcagtcacacatctgcgaataacaccgtcagtacattgaaaatatagaaaaggtttatcccagaaatacctccgtgcatcatgaaggaacctcttcttttgctgccaattgaagtcttcaggtattattccagcagctttaaaatttgccatatttgcaaaccaatgcaccaattgaatagctaacacttgctcatcaagaaaagattcattaatctccatttctggcccatcttgcaagttcttttcctgaattctagacaagtggtcagctactctattctctactccagctttgtccttgatttctaaatcaaattcttgaaataataacatccactgtagcaagcgtggctttgcatcctgtttagtcatcaagtacttaagagtagcatggtcagtaaatataataactttagaccctattaaataagatctaaatttatctaatgcatatactactgctagcatttctttttctatagtggcatagttaacttgtgcctcatttaagaccttgctagcataataaataacatgcaacaatttatcttttctttgaccaagaacagcaccaatggcatatgcactggcatcacacataagttcgaaaggtaaattccaattaggtgctgttagaataggtgcagttgtaagtttttcctttaatacattaaaagcagtaagacacacttcatcaaatacaaaataattttcttttactagaagttgactaagagtttttgcaatttttgaaaaatctttaatgaacctcatataaaagcctacatgtcctaagaaacttctcaccccattaacattaattggtggcggaagtttttcaattaatagcaatttggctttatcaacttctatccccttttcagaaattttgtgtcttaagactattccatcacaaaccataaaatgacatttttcccaatttaaaactagattcatttcttggcatcgtttcaatactttagatagatttgttaaacaggtatcaaaacaagaaccaaagatagaaaagtcatccataaaaacttccaaatctttttctaccatgtcagagaatatggaaagcatgcacctttggaaagtcgctggcacattgcataagccgaatggcatccttgttgattcaagagtagctatctacaaatgagcaaggaatcaaggctcaagtgttttgtgctttcaacatgctcaaggattaaggataaaagtgccaagaaagcttgaagaccaatttgattaatgtaaaagggaagttgtgatctgataatccaaatgagcatatcatgcatgaatcattcatctaggattgttagattaaaggactaaataaaagcaattaactagaaaggcatttaacaagcaaagtttttggaaaaatgaatctttactgcattaatcgattacaaagctaatgacatcgattattttgttcttcgtgcctttagaaaacaaatcaagaacatagtaatcgattacatatcgaattaatcgattacataggccaaaataggaaaatcatcctgactgtcttaatcgattccagatggtcataatcgattacatccgtgcctatggtaaacatgttctactgaggtaatcgattatatatcgttttaatcgattacgtagttcatttgaaaatatgtgactgactgtcttaatcgattaccatagtcagtaatcgatttgtaacaccccgtgtgcacccggcgtattaacattatacaatatcagagtaacgcagcaagcatgaaaataataataataataataaaggaagcatggatccagtaaatatacattctttatacatatatggtgaatctctgtcatatacatggtacatagttctcaaaactgtacaaatcttccctagggttcccaaaatacagacaaaataacaaaatatgagctaacaagctcggtcatctaatcctagtgttatcttcactctatcccggctcagacctcttgccttgagatctctcagggacttcagtctcagttcctgcaacatgagccccaaacaggggtgagataatcatcccagtaaactcagggttctcagaggtttccctccccctggtttactctctagcataccaatatatgtacatagaatatagtataacagaaatcatatcagacaaaatctcattatacaatcagccttcacggctaacaagtacaagttgtattcatatggcatttcaatacaacataagccaacaacacacagtacctgagagagatcatccaccgagtgggtacattctctcaggactttccactgagaacctgaataggatcatccaccgagtgggtacatctactcaggactcgtctcatatgttcctgaataggatcatccaccgagtgggtacatctactcagggtttacatggacgcctatggattatcccaagggagatcatccaccgagtgggtacgttcccaaggggtccatagtacctcgatctactggccagtagatttcatgcaatcacatcacaatcatctcataacaaaatccatacaagcatatactatactagtgtattcaagccatcatcataatcagcataacataccctatctcagtgtaaccaatataaacatgccctatctcagggtcgagctagcactcaattgccagctatcatcaaccatttcatcaacatcaggcacatcattcagcatcgtagcatcataaagtatcagcatacaagatatatcaaacaaacacccaaagtgggtgtagtaaacacaagcaggggaaacaatccccaagaacactgagcttacctggtcgcagctcagaatcagctctcctagtctcgtggtgatctctaccagcgatatgcgcttcacgccctacaataggcatgaatcaaagcatcagtaacggttttcaaccgcttgtatgaaaggaattgctcttcctttctctatcagtccatgtcttctaacttaaggttcatattagctcagcttctactaggcaatccattgactctccatggtctgcctcagtctaactaaggccttagagtctttttaagactctgtacaactcaattcaaagtgttaccagtatcaagaaccaacattggttcaactcagccaaagcaaacatattaacatgttttcaccgttcatttggccttatgaacaacttttgtaaaggtacttaagttaattcaggccatagtacctcttattcacacacacttcttcctcccagagccaaactcaaacttcatcacaatttcagtttcaaggttccatatctctcagaacaacctcctgattattcttttctaaagaacctaagcctaattccagccctatagtcaattggttactattcaccaaatctcccattccaagaattaaacggttaggacgtgagtttcttaccttaattcagtcaaggaaggatggagaagtctttctcctagctctggcgtccttgcaccagcttcttttcctctccaaagctcagctctctctcaagaagctcaaggaatggggtttctttccaacctaggctgaaattggctcctaaatggttcaattcaagattaaaggtgattaggaggtgttttatggttttatgatgaaggtttgaagctcttagggtgcatcaatggctgcctaggctcaaggaagaagaggaacagtgtttttcctctgaaaaatcgcaaaatggccttttataggtggcctgaccgacatgtcgtgctcctggcgccactttggcgcttctggcgccaaaatccagtgtatctggcacccttggcgccactttggcgctcctggcgccagtttccagcatctgtggcgctcctggcgccactttggcgctgatggcgccaaaaatcgtgaaaaataaccttttgctacagtgccacgctcggagcgccagatcccacgctcggagcgccaagctacagtaattgctacaataattttttttttatccatggttattatacaattaatcaatgcatttagaaaacatgcctgactgtcttaatcgattactcaacggaataatcgattacattgatcatagctcaaacccagaacacatcaggagcactttaatcgattacattcttgaattaattgattacaaatgcgaaataatcgattacaggagcgtgtttaatcgattattttcagttagaaagctgttataaatagaacccactgctatgtgtttttgtaacttgagaatttcgaaatctgagcattcacaaacactcataagctttcattagtgactttctgagtttctaaaggcatctagtcttcacaaatttatatgggttgttaaatcaaagaagtgaagcatcattgttcatcaaagcataaggaaaggaatgcattgagtttgtaatctatcattcaacctgttgaatcattcattttgcatgagttcttggattatcaggtgatatctttccttattctttgaaggtggaaaactgttatttgtattttttgtaaagattggcttattgtaaatgggtttcttgcatgatgattagagatagtgtttctctaagggaagctgagtagtgttctcagtttgggtttggtctctaagggtctaatagggttttagacttcttaactttatctagggttgataaagagaggcttgtaatatcttgtaagaataatatttgcaatagtggaactctactctagtgttgagtagaagaactggatgtagcttcatagtgtttgaagtgaaccagtataaaaatctgtggctaatatttcttctcacctattcatcttttaattgctttgtttgtgaatcaatttcattgcacagaaagttatactctgttttctctttttcttgacaaaggaatttgattgaatattgattcttggttttagaacattttttaaaagtgataaagatactgtggaaaaactctgatttaaaattttaatttaccaaggttcaaccaattcaccccccccccctcttggttatgttgaagtattctattcattttcaattggtatcagagctggttcttgtaagatactcaagatcactttttcttttcaaaaaggaaaatgaatacttctcaaataacctttaaggagggtgcctctttaaacagacctccaatgtttgaaggggaacacttcagtttttgaaaaaatagaatgaaaatctttattcaatcaaatgacccaggagcatggaatgcaattgtgaaaggtccctttattccaaagaaaactgtggcaaatgagttgattcccaaagaatgggatgagatgactgaggcagaacaaagaagtgcccaatatgattttaaagctaaaaatatgatcacctctgcactttcctctgatgaatttttcaggactgtaagatgcaacagtgcaaaagaaatgtgggagatgcttgaaattactcatgaaggaacagaggaagttagaagatcaaggaagcatgccttgattcatgagtacgaaatgttcaagatgaattctaatgagagcatttctcagctgcagaccagatttacacatattgtaaatcaccttttgggtcttggaaaagtatttgacacagaagaattaaacatcaaaatattaaagtgcttgacaagaccttggcaaccaaaagttacagcaatcaaggagtccaaagatttgtcaaagatgtcaatggctgcattgtttggtaagcttcttgaatatgaattagaaatgtctcaattaacatcttgtgaagatgcagaaaaaaaaataagaagcatagccttgaaagctgcaactttgaaagctgaaaaggaagaggaaacaagtgaagaggatgatgaagacaatatcaacttggtggtcagaaaattcagcaaatttctgaagaaaaataagaataaaaagttcaacaaaggtagcaagaatagcagtagcaacaacaacctcaacaagaagcttgacaacaacttcacatgctttgaatgtggaaaaccgggtcacatcaaatctgagtgctcaatctatttgaggaagcaacaaggtgaaagcaagatgaaaaaggaaggaaaaggaaagagggcatacatagcttgggaggataatgagtcaacaacttcagattcttccacagaaaatgaagaagctaacatgtgtctcacctccaccatcaatgatgatgatgatgatttgctaagtgaaggagacgaggtaaattctgaacttgaccaagctattcatgcttttcaagaaatgtatgaggaagcccaaaaacttgcaaaatccaataataagctcagaggaaatcttagatggcatattgagaaaataacagaattgcaaaatgagatttgcaacttgaaagaagaaaatgaaaaaaaattaaatgaatgtgtgtgtgcttcttcctctagcaatgttgacaagtataagttgcttcaaaaggattttgatgagtataaacaaagtcaaggtgaaaaatatatgttgcttttagccaaaaacagtgatttgattgatctcttgaggaagttttataagggaaaatgcaacttggctgaaatgttaagtgtgcaaaagtatgctggagatacttctggtttggggtataaacatggatcaaaatcatttggaaaaatagtttttgtacctccaaaacagaagaatcaaaagtggcaaaagaactcaagggtcaatcaaaattctgctattaggaaaacttcaaaatctgtcacttgcaactattgtatgaaaaagggggacacatattttaaatgctatgctaggagattctatgtgcctaatggtgattgcatttggattcccaaagtaaaaagaaatgctaacccttatggacccaaccatgagtgggtaccttccattaaattctgatttgaattttgcaggtgtgtctaagagctaggacatcaacttggtatcttgacagtggatgctctagacacatgactggagacatgtcccttctctcaaatctgactttaaaagaaggaggatatgtcacatatggagataataataaagggaaaataattggagaaggcaatattggagacagcatcaaagcaaagatcaaaaatgtgctgtatgtggatggattaaagcacaatttgttgagcataagtcagctatgtgacaaaggctttaaagtaaatttcaacaaggattgctgcataatttctgatgagaaaagtggtgaggtactgcatataggtaaaaggaaaggtaacatatatgtgctttcaattgatcatgcattattccataaaacttcttgcctagtaagcaaagttgatgaaacttggctgtggcatagaagagcaagtcacataaacatgcatcacatgaacaagctcataagaaaagatttagtaattggattacccaaactcaagtttgagaaggacaaactttgtgatgcttgtcaaaaggggaaacaaacaaagaactcttttcaaagtaaagacattgtttccacctttagaccacttgaacttcttcacattgatttatttggtccttctagaacaatgagtttaggtgggaatttttatggacttgtgattgtggatgattactctagatacacttggactctgtttttgaaatccaagagtgatgttttccttgcttttagaaaaatggccaagcttactcaaaatgagaaaggatgtaaaatagtttcaataagaagtgaccatggtggtgaattccaaaatgaagattttgaaaaattctgtgaggaaaatggaattaaccacaatttttcagctccaagaacaccccaacaaaatggtgttgtggagaggaaaaatagatctcttgaggaaggagctagaacacttcttaatgaatcaaatttacctaagtatttttgggctgatgctgtaagaactgtgtgttatactttgaatagattacttataaggcctattttaaagaaaaccccttatgagctatacaaaggaagaaagcccaatatttctcatttaagaggttttggcagcaagtgttttgtactgaacaatgggaaagaatcacttggaaaatttgatgctaaggcagatgaagcaattttccttggatattcattacatagcaaggcatatagagtattcaataaaagaacaatgtgcattgaagaatctgtacatgtgatttgtgatgaaactaatccctctaaggaggaaaaagagttggatagtgatgcaggtcaactggaagaattaatcgaaatagacaattcctcaaccaaaattgaagaaccaagagctgaaacagaatccacaacccctattcaaatgcctaaagattggagaacaacaagagatttatcacttgacaacatcataggtgaagtttcaaagggagtatctactagatcctcattaaagaacctatgttgtgatatggcttttgtttcacaaattgagcctaagaacattgatcaagccttgaacgatgaacattggatgcatgcaatgcatgaagagctcaatcagtttaagagaaatgaagtttgggaacttgttcctagaccttcatctcttaaacccattggcacaaaatgggtttttagaaataagcttgatgagagtggaatcatagtcagaaataaagctaggttggtagctaaaggctataaccaagagcaaggcatagactatgaagaaacttttgctccagttgcaaggttggaagcaatcaggttattacttgcatatgcatgtctcatggatttcaaactttttcaaatggatgttaaaagtgcatttttaaatggatatattgaggaggacatatatgttgaacaacctcctggttttatagattttaaacatccaaattatgtttacaaactgaaaaaggcactttatggtttgaaacaagctcttagacaatggtatgagaggttaagcaaatttttgcttgaacaatctttttcaaggggcaatgttgataaaaccttgtttatcaaaaggcttggaaatgatttcttattggttcaaatttatgtggatgatattatatttggttctactaaccacaagttatgcaaggatttttcatcagctatgcagaaagaatttgaaatgtcaatgataggtgaacttacattcttccttggacttcaagtaaagcaaatgaagaatggaacctttcttaaccaatccaaatactgtcttgaaattatcaagaaatttgaaatggagaagagcaaggatgctgcaactcccatggctacatcaacatatcttgattcagatgaaagtgggaagaaagttgatgagtcaaagtacagaggaatgattggatcattgttatatttgacagctagcagacctgatataatgctcaatgtttgtttgtgtgctagatatcaagctaatcctaaagaatcacaccttactgctatcaagagaattctgaaatatctcaaagctacaccaagagttggtctttggtatccaaaaggtgcttctttaaatattattggttactctgactctgattttgcaggttgcaaattagataggaaaagcacaagtggcacttgtcgtctactaggaagctcattaatctcatggcattgcaagaagcaatcctgtgtagcattatccactgctgaagctgaatacatttcagctggaagttgttgtgcacaaagcttgtggcttaaacagcaaatgcttgattatggagtggaactgaatgctattcctctggtatgtgacaacacaattgctatcaacatatcaaagaacccaataatgcattcaagaacaaagcatattgagataagaaattatttcctcagggatcaggttcaaaaaggtaacataaaggtagaattcattaacaccaatcatcaactagctgatatattcacaaaaccattatctagagatagattttatactcttagaaacatgctagggatccttgatgagaacaacattatctagcctgtttatatgtgtctttatgtgatgattgaaagcctatatgtcacttaatgaataagtgtttggatcattgtcaaaaagctgctaaaatgctctgcatctgatgtattcactgaaataatcgattacaccacgggttaatcgattaaaatcattaaaaatcaagtttggaacgaaattagtactcatgtaatcgattgcacaagaatggtaatcgattattcttcacattttcagaaatcacttatctctggaataatcgattacacatcgggataatcgattacattgttcaaaattataaatctaaaagcatgactcactgtgataatcgattacataagagttgtaatcgattaccgttcatatcagaaataactctcactctgtgataatcgattaccattcgggataatcgattacttatgaccctgatacttgtatgattgaagcaagctctagaataatcgattactttgagaaagaatcgattaccggtcatcttcaacctcaggtcaagaatgaaataatcgatttcttatgaaattaatcgattaccaggtgttttaatgaagcctaattgctctgaaataatcgattacattacgaaataatcaattattcatgctgttgtatgaaatctgacaggtttttatgaataatctaactgcccaatccgttttaaaccaacccaatgtcattaaactgtcaccaacagctatatttttgaaattatggacgttaagtgtttgatttatgcctataaatagaggattggaagccttagacaatctgcaccttgtccactactcctctctgcaaatttcttaatttttctaagttccttgtgtcgaaacgagtctctgtaaacatgtctaacccaacacccaacaaagtaagaacctcaaagaggaaagctggtgagtcttcctcaaatccccctgcacctcagccagccaatagactagatttatggttttcatccgaggctgataaaatgaactacctgcagttcaatgccacaaaactagtggccacccctaaatacattgagcctgattggtttatttggcaaggattccagtttccagcctacttagagtctcaaagccttaggagattcttagaaatgaagggtactttctaccctgatcttgttaaggtcttttacacctgcttgaagggctcaatgcagggtgacatgaaatcaaaagttaagggagtaaccatgcatattactcctgaaatatgggaaacagtagccggggtagtgtgtgaggcagcccgtaggtttgatgaagaaccagagggatatagcaagatagaaacctacagaagcatgcttcatgatcctcacatgaggctaaggaccagacttggcacaggtcctatgactgctgaggataggatgctacactatttgatcacatacatcatcactccaagggctacaaatcatgcacaagcaactgatgaggatcttcagttggtgtatgggatgaagcatcacattcccatgaactgggctcttatttttgaagaaataatgctgaaatcaaaaaggttggtcaattacccattcccctaccctgtgtttgtgtctaggctgattgatcatttcaacattgatgttgaaaatgaagttatagacaacacaaactcctacaacagccaaattaaggacaagcacttgaccaagatgggtatgagaaagacacccaatggttgggtgatggcaaatcaagtggctgaagaataaggagaaatggtggctgattcagatgaagaacatcagcaaccacagcatcatcaacagcctgcacagccagtcttcacagactttgaatccttgatgattcaaaggatggacttgtaaggaccctccatgtggcgcgggtggcgccagatcccacgctgatagcgccgggatccttcaacagaaaaccctgttaagggtgtggcgcggttagcgccagagctggcgtggatggcgccagactctctggaatgcggcgccaggggcgccagactcacgctgggagcgcgagattctctggaggaccacgcctggagcgccagagttagcgctgggggcgccaactgggtttgaagggtggcgcggatcgcgcggggttggcgcggatcgcgccacaggctcggcttgttcacgctgatggcgtgggagaggcgctgatggcgccacagttctgtacctggcgcggatggcgcggaatcccgcgcggatcgcgcgggaaagtcggtgcaaactatatttagaggggggtcgcgtttttgagggagaaaaacctttctccttcttccccaacgcccctaacctccattgttgagtttcccaagctcccatgaccttgccttgtgaccttaaaccctttcttaagcctttaatccttctagaaaccgagagagagcgagaatccttcctctgtaatctttgaaaccccagaaatctccttctctaagaaaggttgaaggaagctcgggtttggcgaggaacggcggtggttcagcgacaccagggctcagaagagtagcccagaggccttcctcatcggttctgaggtaagaaactcgagtttcttcgtttgatttggaatctgggggtttcctgtgaatagtgacccatctgtgatagagccagaattggctctgggtctagttgagagatgtgtttagaatgatgagaggaggaaggattagctttcagtttgtgatttggtgaatgttggttttggctctaggctgtgcatgtgtgacttggactgagtcacttgatttgagacatgcaagagccaatataatggacttgaggtgcctgataggccatggggacggtgtctggtgagatagaccgtccaagtcctgagaaacccagaggatctggggttgttagagcttcgagctctctgtgaatggcttgtgtatgagtctggaacgactctggggccatgtttgctctgagatggaccactgagggtctatggaaaggcttatagaggatgagcctgatgaaccttaggttgatgacctgggttgatagaaaggactgaggttcctttctcagagacaattgaagactgtctgatgagctaatgattgtttatgtgcctgaatggtctgtgatatgtggttgtgtaccttgatagggcttggcacgaggtgtcagaggagcagaccatcattctagaggttgaagttaccggcacatctatcaggtaagctcatcgctctggggattattccctttctcttgtttgccacccaagtaaggggtgatgaatgcatgatatgtttgatatatatatatatatatatgtgtgtgtgtgtgtgtgtgtgtgtgtgtgtgctggaagcctgaagggctgataacggtccttggagtggagctcaggacgttctagaaatatgattatatgatgaatcctaggtcagacaccgagacagtgtgaggtgtttagtgattctgatgagatgcagaccatgaggtggtctgtgatggaacctataggataccggactggtatcgggctagctgaggttccctagccagaggaagagtttgaggactccctggaatagctgagattccttgggaggtgccactgctctccattaaagtcctaagggtggattgccctatatggaggttcctccttaggcagagatattgagaatcctgagtggttatctcaggtatgtgattaagtcctggatggttttcccaggccaatgtatgtgaaagtcctggagggttttcccaggccagtgttgtggagttcctgagagattgagtgcctccgttgtgagatgatctctctcaggtagtggattgacagtctgagggattgagtgcctccgatgtgagatgatctctctcagaccgtgtctggaagtcctgggggattgagtgcctcctgtgtgagatgatctctcccagacaggggaaaatcctgagggatgagtgcctccgttgtgagatgatctctctcaggcatgagatgtgaagccctgaggggttgagtgcctccggtgtgagatgatccctctcaggcattggactggaaagtcctgagagattgagtgcctcctgtgtgagatgatctctctcaggcatgtgttgtggaaagtcctggaggtgattgcccatttatggatgttcttgcccaggcatgtgtcatggaagtcctggagaggccaggcagtagacagatatgttgtatctctaagagaaggcttcccgaggggatgagagcctaaggcctcttagatgagccatatctggattcttgaagtcctgagttgagagatttctcaggcaatatgcttgaagtcctgagttgagagaatcctcaggcaatgtgtgtgaagtcctgagtaggtaactcaggcaatgctggttcagtgatgaggcggtgcctctctgatataagatgtgccctggggtggacactatggtagtgtacctctgtggagacgagttttgagatggcttgagagccagtatgaggtgggagacctctgatgctgatggcatccagtgtttgtacccagatggctgggatgggtgaaagctaggacgatgtcctagacattgtatgtgtgagctaggacgatatccttagctctgttatctgttttatgtgtttgtgcttggaggtgaaccagggtaagggaagatttcccagaaccctgagcttactgagacgtttgtctcaccctatgtggggtttgtggttttcaggtgcttctagaggagaggagcaaccacagggcaggaggccctagctgagagtgctggagcggtcatcagttgcagatgaagactagaagagtctttttcttttgatctctgtctagtattctgtataggaatagggtgtgagtgtacacccgttgttctgtacataattatgaggtatgaccagatgtggacttgtttttgagcatgtatatgtacagatgataatgttattatatttgagtttatgtttcctcctgataactctggttagatttctatgtttgtatctgcctatgtttgcatgtttctgtttaactggatcaatgggggcttatgtatgatattatatggtttgtttttaattccatgcataatgaaatcaagaaaaacgattctttcgcttccgcaccgcgattagataacgctgatagcgtgatactgatattgttgatgataatgcacggggtgttacaggactccttgctgaagcttcaagaagacttcaaggctgaaacccatgaagccttagaagaaattagagaaaagcttgactcaattgaggctaacatggatgatagagcctctgctgagttctaggattgtttagatttagttatatgtttgttaaattttcttgttaaactatgttatgttctgtatctttaagttttttttaattccatattgtactgccccatgtgctttcatatcaatgaaatatgcattctctgtttattatccgctgtgcttaccttatttttgacttttaacaagccaaatagggggagaattgattaagggggagtgactttaaaatcactctgtttgcccttgttttttggttcagttttggccaaaattttgatttgaatgagtgctgaaatttaggggtagtatatgtgtaaaatggaaactaatcaacaagtataaagcttaattgaaattatatgaatcatatgtgctttaacatttgtttcttggcaaggtattttgaaatttttacaggtttaagcttgatgttcaacaatggaatttttcattcaatccccaagcatctgtgcttaatcaaattgaagatttggcatgtttaatgtaacaccccgtaggcctccgacgtgttatcattaataatatcagattagcgcataaaacatagattataaaaaaattagcggaagcagagaatcgtttttctcgatacattatgtatggaataataaatctatcagacaacacacacattaaaactgaaataccacgcccctgctgatccagtttttcataaccatcatcatatagacagataatttaaacatataggcagataatcaatattcaacaaatgtgctcaggggaacgtctcacatacatatcataaaagttctgtacagacatatacatcagtccacaccacacatgtcgtggtgatacaaaagaatatcagccctccatgagggtatacaggaccatatatcaaaataaaactcaaaatagagcctgtaagctctccatgccgcctctcagtcaagcagcctagtctcaactgggcctcctgccctgagactgatcttctcttctagaaacattacctgaaatcatgtaagccccacacggggtgagataacatatctcagtaagctcagggtccttgggaaatcattcccaccctggcccacagattcacaatacataaacaaataaacatcacacaaggcccactggcctggccctctagcctcatcataacaaatcaatatcatagcaaagcaatatcacaatctcagcacatgacaggtggcagagctcctcaatgcctctgacggagctcctcaacgtcagtacctgtcatgatgtggcagagctcctcaatgccactgggcggagctccttaacacccataatacacggcggagctcctcaacgccggtatctatctattggccaatatcatgatgtggcagagctcctcaatgccacaggcggagctcctcaacgcccaaatacacggcggagctcctcaacgtcggtatctgtctattggccaacagatatctcaagcacagcacaatatcaaatgcagatacataatctcaatacatcaatgtcacaaccaatgcatgcatcatgaatcatgaccaacactccccaggagtgtggtgtgcaaccaaagcgggaactcattccccagatacactgaacttacctggtaaggtctcagactgcagttccttcccaggtctgtggctcccgccaccaacaatatcaagctcaaggcctgatcaaagcatacataattacagatcaatacttagccatcaggcttaagcacagaacataacataacataattctcctatcctagggttcaaacaagctcagcctacactaggctgctctcggaccactcaaggcccatcaggtcgcatacaagtcatcggagtcatcccagactcagagtatagccatctggcctagtttttctcaaccttagctcaattatcatcagaatggactgagttccactcaaagtctcattccatcagtccctcaggctcaatatgactcagactaaggctctggtatatgaacagacacgcacaagtgaccattacacaggccacacagacagtacagagccaaaaatccaaagtcatcagaatcaaaaactgaaagctaatccttcatctctactcaactctgaacaatattctctacaggaccctgggctaattctagccccagctcatatgggtcactattcacagagaccctcaaattcaaaattaaccggagaaacttgagtctcttacctcagtggcgactcaaaaggccgcaggacagcttcctcaagttctgacgtccgtctcccgccttagttctcgcctattctcaagttctctgaggttttccacttgagaactcaacctctcactcacaaatggttttcaagtaacagatgaaggatttcagctttctaatcggttctaacaagattataggtctcaagaaggtgtttaggctagtatatacaggtctaggaaagctcagagggtctctaatggaagtttgggctgagggaagaagaaaataccctttttttcctctcccttttcgcgtttatccttaaatatactcggcctgcccgcgatcccgcgcgatcagtgccagatatggcgcgatcagcgccacaatggcggtggtcccgcgctattggcgccgtaagtcacgctattagcgtgaacaggccgcatgaaaatggctctccaggcactttctggcgcgatccgcgcggccttggcgctacccgcgccaacctctcggccagtccacgccattggcgccgtcgccacgctattagcgtgaactttccgagagtatggcgctatcagcgccacactggcgcccctcgcgccacaaccaaaacatatggcgcgatcagcgccaactctggcgcgacccgcgccacacttaaaataagcttttcttaagtgaatccccgcgcgacagcgcggggtctggcgccaagaataagggtccttacatttaaagccaaaaagggggagattgttgattcaagagtagctatctacaaatgagcaaggaatcaaggctcaagtgttttgtgctttcaacatgctcaaggataaaagagccaagaaaacttgaagaccaatttgattaatgtaaaagggaagttgtgatctgataatccaaatgagcatatcatgcatgaatcattcatctaggattgttagattaaaggactaaataaaagcaattaactagaaaggcatttaacaagcaaagtttttggaaaaatgaatctttactgcattaatcgattacaaagctaatgacatcgattattttgttcttcgtgcctttagaaaacaaatcaagaacatagtaatcaattacatatcgaattaatcgattacataggccaaaataggaaaatcatcctgactgtcttaatcgattacagatggtcgtaatcgattacatccgtgcctatggtaaacatgttctactgaggtaatcgattacatatcattttaatcgattacgtagttcatttgaaaatatgtgactgattgtcttaatcgattaccatagtcagtaatcgattaatcaatgcatttagaaaacatgcctgactgtcttaatcgattactcaacggaataatcgattacattgatcatagctcaaacccagaacacatcaggagcactttaatcgattacattcttgaattaatcgattacaaatgcgaaataatcgattacaggagcgtgtttaatcgattattttcagttagaaagctgttataaatagaacccactgctatgtgtttttgtaacttgagaatttcgaaatctgagcattcacaaacactcataagctttcattagtgactttctgagtttctaaaggcatctagtcttcacaaatttatatgggttgttaaatcaaagaagtgaagcatcattgttcatcaaagcataaggaaaggaatgcattgagtttgtaatctgtcattcaacctgttgaatcattcattttgcatgagttcttggattatcaggtgatatctttccttattctttgaaggtgtaaaactgttatttgtatttttttgtaaagattggcttattgtaaatgggtttcttgcatgatgattagagatagtgtttctaagggaagttgagtagtgttctcaatttgggtttggtctctaagggtctaatagggttttagacttcttaactttatctagggttgataaagagaggcttgtaatatcttgtaagaataatatttgcaatagtggaactctactctagtgttgagtagaagaactggatgtagcttcatagtgtttgaagtgaaccagtataaaaatctgtggctaatctttcttctcacttattcatcttttaattgctttgtttgtgaatcaatttcattgcacagaaagttatactctgttttctctttttcttgacaaaggagtttgattgaatattggttcttggttttagaacattttttaaaagtgataaagatcctgtggaaaaactctgatttaaaatttttaatttaccaaggttcaaccaattcacccccctcttggttgtgttgaagtattctattcattttcaatccttctataagcgaatactccaaagggacacgtgaaggctgtcttctcttgatcttcaggtgctattggaatttgtttgtagccagaatacccatccaggaagtaataaaatgcatgtccaaccaatctttctaacatctaatccataaatggcaatgagaagtggtcttttcttgtggcatcattcagtcttcgataatccacacacatcctccacccggtgattgttctagtgggaattagttcattgttatcattatgaactacagtcatcctacatttcttgggaacagtctgaacaggacttacccatgcagtatctgagattgggtaaatcataccagcatctagcaatttaaccacttcctttctaaccacttatttcattgtaggattcagtcttctctgaggttgtcttactggctttatatcatcttccatcaagattttatgagtgcaaaaagagggattaatgccctttaaatcagatatagaccatccaattgcactcttgtgttccttgagtactttaatcaatttttcttcttcaaattcagacaatcctttattgatgatcacaggatatgtcttctcttttcccaagtacacatatttcagattttcaggcaattccttcagctccaattttgctgctttactggtgatatcatcttctttcttttccagcacctctattgcaacttcctgatcttcagttgaactctcttcacatctgatctctagcacttcagctaactcttgatcattggacttctctgtatgcactagagtatctaatatatcaagtctgaaacagtcatttttattaataggatttttcatagcatcaaaaacgttaaaaacaactgattcatcaaacattctaagttctagttttccctgggctaaatcaattatagctctagccgtagctaaaaatggcctacctaagaggataggtatctcactttcctccatgtctagaactataaaatcagctgggaaaataaatttgtcaaccttaaccaagatgtcttcaatgactccactaggttttctcaatgatctatcagccaattgaagagacaccatggttggtttcagttcagaaattcccaaggatttgcatatggagagagacatcaagttgatgcttgctccaagatcacataaatccttacccgcatttacattacctattacgatcggaatgttgaaacttcctggatctttgagtatgggtggaactcgcttttggattatggcgctgcactctttagtaagcacaacgatttcacattcctgcaatttatgctttcgagacaacaaatctttcataaacttagcataattaggcatgttagcaaatgcttcagcaaatggaatgctaatatgcagttttttaaacatttctaaaaatttagcatattgtttcttttgagcttgttgcttaagcttcgtgggatatggtggtttttcaaaacgagaaaaatccattacatttttaggatttgtagcagcgaaatttttatcattacctgtttgtgtctgtacctttgcttcttgctcctcattttgattggttttatcttcctcaccaacctttttctgcactttattagtcttttcttgaggtgtgataacagttccacttcttgtacttattgctttagcttgttctcgtggattgatcactgtatcactaagaaattgcccctgctgtctttctgcaagctgcttcgacaactgaccaatttaattttcaagattgtgaatagacgcatcttgattcttgtggtgggctctggtctcattgatgaatgcatttgtcgcttgaatgtgctcattagtagtcttggacagctgtatcatagctttctctaattcagagggttctttaggtggaataggtggaggctgcaaataattgttagatttataatctatccctcctccttgaaatttcctctgaaaattattacccatagcaaagttcttatttctctggaatttttgctggggtctttggtcataccacacaccattcacctgaactgggcatgctcctatcaatgtgggacattcatttgtctgatggtcctcttggcaatattcacaactaaataccggagctctacttggtgcggcttgcactgcagaaatttgaagcttgtcaattctctcattaagcttagcaagttgttgtgacaagagtttctgttatgctaacatggcatcgctactccccaactgaatgatctcacgtttaggttgaattgcaatgctctcgttctcatttgtttccaaggagtcgatcaactcataagtttgagttgctgttttagatctaattgaacctcctgctgcaacgttaacaatcatcctagattcaggagtcatcccattgaagaaaatcctcaccttcttcccaacaggcatatcatactgaggacactttctgattagctcctgaaatctattccaggatgcacacaacgtttctctaccatgttgagtaaaattagtgatttcattcattaatttattatatttttccatagagaaatgttgagcaaagaactttgcagccaactcgtcccatgtagtgatgttgttagaagtttgtctatctaaccatctgagagcctttcctttaactgcaaaaggaaataatcgcggtctaatagcatcatcacttaccccctggtgtcttattgtatcacaaatcctcaagaatctatccacaaaatcatgggggtcttcgtcatcttcaccaccaaactggcttctctccaccaaagtaattaatgatggatgaatatcaaagtggttcgcctctataggtggtttgacgatactagaatttggtctggtgaataatggagcaaggatatcctccattagttcatctcccgatcgcggctggttattgtttctttcagccatctctaattcaattgcaggttgtgaactagagttttctgctctctgtttttgcttagctagcttcctgtttcttcttgcagtcttctcgatctctagatcaaactgtaaagtttcaggttcaactaaccctcgcataaactaaagaaaacagatcagtaaaaaaaattccaatattaaagaataaaaattacaattaaattggcatactcaatccccagcaacgactccaaaaacttcttgcgcattcggcaagtgtaccgatcgtacaagtaataaagtgataagaaagtatcgtctccacgaggattgaggcactaacttattcgtaattattatctttatattggaaagaataaaaataaagtaatttgtgttttgtgtttggaaattataataaaactgaattaaatttaagaattgtaaatacgatatgaattaaagattatgcagtaatgaggaagaattgtggttaaagcacaataaccgctgatccctactaatgtaattgagttgataattaatttcacttactataattgctcaaagatatgccttatataattagttaaaccctgattcctcggtcattttaaccctttaatcctaatcaagcattctaatcccttagcaaccccttttcagattaagctttaagttggcatattatgctttgcaatccttcatccctatccctaggtaatgtcgaactgttactttaccgctttcagaaactaaaaccccaatatccctattgtgaattttagcccttagaacccctaatagattgatcaagtctatcaatgacaatcagaattaaagaacaagataaagtgaaacaattataataaatttcattaatatcaattcaatccacacaagagttcacattggcttatggcctcaccataatcaaagaggaattagccagacatgattatgtctagctcaatacaataatgataaggtagatgagaaaaaatacaagaaggaagagtaatcaaacccctcaatcttggccttcttcttgatcttccttcgttctcgatttccttcaatgcctcattttcttgtttctgcctctatattcgtccttgaaaacgtcctattactttcctatttatagccaagtttgtaaaaccctaatatcttttcttcttatcatatctttaagctgattttgaatttttcatgtcgtccacgccactggcgccagtctggcgtgactagcactagcttccagtgaatgtggcgcgatccgcgcgggagtgacgtgattagcgccaacttgcagtggatgtgacgcgattggcgtggtcctggcgttgatggcgcgagcttgcaggaacagttagctctaatcttgcttcttttcttccttttcttggctcctaatattcaaattgcatgaattagtaataaaatcaataataatgcaatttatatttattttagcttttatttgatattatatgcttaattttctaataattttaacctaaaaactactatatgctaacagcatatcaataccctgttaacttattttttaatttgttacttttaagattaacttattaaaaggtattgtttatgtggataaaaaaaagaagtggaagaaagttgtgattttactggataaaaaaaaattgtggctttagtttacataaattcgtggtggctttctcataatcactaagttttttttttgttcattttatattttttgttaggaatataaaaataaaaatgataatgaaaaagataaaaaaataaatatttgtttcagagtttaatttattcatagtggtttcaaataaaaataattattctaagtactcatggaatagtttgtgacattaattgagtaacaattttattttaatgttacttaactataaaagttcagagaataatcatttgtcagaacttttgtgtatgaagtttattttttgataaaaataaataaaaatgttctttttataaaataataaaaatcaaaaatattttcttgaggtaaagtaaatatttataaagtttcttagctgttgtaggaatttctaatttttttccctcaagataaaaatattgatgtcaactccattttaaatatttttgcatcgtcccatcctgattcctattgcaacagtatgtaaatactcaagattcaaaaataaacactacaattattactcatagataaataagttcaaaataaaaatggaaatatgaacacatgtattatcttcccttcacggcttcaccaacctcatttactgcgtgaaaaaaaatattacatatgtttccagtgaagtgttcctttaatggtatgtatgtgcaatgtaccttgatttttcagaaatcaaactccgtagtggtttttgacaactaatgacagcaaacaggtttgatattttttgtccctcatttccgtgaccattttcatttagagtactaggtcagaaaaacaatgatatatatatatatatataaagagagagagagagagagagagagagctatgtataaagataataaagtctgtattttagactgaacaatattgctggtcactaacattataactttataaatataaatatattattaattaatttataggtaatgatgaaaatatnnnnnnnnnnnnnnnnnnnnnnnnnnnnnnnnnnnnnnnnnnnnnnnnnnnnnnnnnnnnnnnnnnnnnnnnnnnnnnnnnnnnnnnnnnnnnnnnnnnnnnnnnnnnnnnnnnnnnnnnnnnnnnnnnnnnnnnnnnnnnnnnnnnnnnnnnnnnnnnnnnnnnnnnnnnnnnnnnnnnnnnnnnnnnnnnnnnnnnnnnnnnnnnnnnnnnnnnnnnnnnnnnnnnnnnnnnnnnnnnnnnnnnnnnnnnnnnnnnnnnnnnnnnnnnnnnnnnnnnnnnnnnnnnnnnnnnnnnnnnnnnnnnnnnnnnnnnnnnnnnnnnnnnnnnnnnnnnnnnnnnnnnnnnnnnnnnnnnnnnnnnnnnnnnnnnnnnnnnnnnnnnnnnnnnnnnnnnnnnnnnnnnnnnnnnnnnnnnnnnnnnnnnnnnnttttatcttgttttaattagttcaaaaaatatcattatataattcctttttaaattaaatatttgttatattagtcttatgcaaaagacaagattcaaataaaattataagaaatttaatgaattattttaatcaatttaacttgcttctcttgatctttaaatatacagaatgtcagtcctatttatattgcaagtcatttgtgatttaaataattcaattttttttaatcgttataaaaaatatttattttctttaatttttttgttaatttttgttttcaaactttaaatttttttaaagtagtctttattagtagttaatgcaacacgatttggccatctccatcacaatgctgaaaaggaccgatgctcgttaaacattcaaccattggacaaatgtaattattagttattaagcatcggtacttattatgggtatttaaaaatataaaaaaaaaattatatgataaaaaataaataaaaagctgatgtaacatcacttctcatactaatttgggtaaataatcattttcatcccaaaatatgtagagcgctgacaaattcatacctaaaagatggaaattcaaatttttgtacctaaatatgaacaaagtgtgaaaaattcattcatcattaacttttgtccgttatcgttaattgaaagagcctacttgacacattcaggaacaaatttgtctgtgttttacacattcagggatgaatttgtgaactctctactaaaaatataatttaatcttcctattctccattttttaataattacaaacataaaattataataaacacttaaaagttagaaaaacaaacataagttaaaacaaacacaataataaatataatattgattaataagtataatttatttgttgctctgaaatttctattgtaaacaacattagataatgacaaaatcaagttgagtctcattttttttagggttaatttaatgactgtgcattttaatttgtttgagtctcatattttggataaggtattatctcatatttttactttgaaatttttattgtgacagtaccttaccccaaatatgagactcaaacaaaaatatacagccattaaattaattcttacaacaaaaaaaattaaactcaacttgattttttcattacctaatgtttttacaataaaaaattcagagcaacaaatagattatgcttattaatcaatattatgcttattattatgtttgttataacttatacttgctttcctaatttttaagtgtttattataattttatgcttctaatgattaaaaaaggaagaatatgaagattaaattatattttgggtagagagttgacaaatttgtccttgaatgtgtagagcgacaaatttgtctctgaatgtgccacatagactctttcaattaacagtaacggacgaaagttaatagaggtatagatttatcacacttttttcacttttatggacaaaaatttgaattttcatctttcagagacaaatttatcaactctctatatattgagggacgaaaataactatttaccttactaatttagtaaagttttaaagttgttggattgcaaaaataattatttaaattaggatcagaacatttctaataggacacttacataaattgttcttaatttttaagtaatgttttttaactttttttttattgaagtaaataacatgaagttgtttgtaaagcaccattgctaatataagtaattattatttaaaatatttataccataaataatacattttttaagcattaaacaacttataaaattaaattaaacacacattttattaacattaagcatttgagtgaatttttgtgtatagtgtttaaatttatgtgaaattataaaacccataaaattaaaataagtaacttatctatacaactatgcattgcattgtagatgattttagttaacannnnnnnnnnnnnnnnnnnnnnnnnnnnnnnnnnnnnnnnnnnnnnnnnnnnnnnnnnnnnnnnnnnnnnnnnnnnnnnnnnnnnnnnnnnnnnnnnnnnnnnnnnnnnnnnnnnnnnnnnnnnnnnnnnnnnnnnnnnnnnnnnnnnnnnnnnnnnnnnnnnnnnnnnnnnnnnnnnnnnnnnnnnnnnnnnnnnnnnnnnnnnnnnnnnnnnnnnnnnnnnnnnnnnnnnnnnnnnnnnnnnnnnnnnnnnnnnnnnnnnnnnnnnnnnnnnnnnnnnnnnnnnnnnnnnnnnnnnnnnnnnnnnnnnnnnnnnnnnnnnnnnnnnnnnnnnnnnnnnnnnnnnnnnnnnnnnnnnnnnnnnnnnnnnnnnnnnnnnnnnnnnnnnnnnnnnnnnnnnnnnnnnnnnnnnnnnnnnnnnnnnnnnnnnnnnnnnnnnnnnnnnnnnnnnnnnnnnnnnnnnnnnnnnnnnnnnnnnnnnnnnnnnnnnnnnnnnnnnnnnnnnnnnnnnnnnnnnnnnnnnnnnnnnnnnnnnnnnnnnnnnnnnnnnnnnnnnnnnnnnnnnnnnnnnnnnnnnnnnnnnnnnnnnnnnnnnnnnnnnnnnnnnnnnnnnnnnnnnnnnnnnnnnnnnnnnnnnnnnnnnnnnnnnnnnnnnnnnnnnnnnnnnnnnnnnnnnnnnnnnnnnnnnnnnnnnnnnnnnnnnnnnnnnnnnnnnnnnnnnnnnnnnnnnnnnnnnnnnnnnnnnnnnnnnnnnnnnnnnnnnnnnnnnnnnnnnnnnnnnnnnnnnnnnnnnnnnnnnnnnnnnnnnnnnnnnnnnnnnnnnnnnnnnnnnnnnnnnnnnnnnnnnnnnnnnnnnnnnnnnnnnnnnnnnnnnnnnnnnnnnnnnnnnnnnnnnnnnnnnnnnnnnnnnnnnnnnnnnnnnnnnnnnnnnnnnnnnnnnnnnnnnnnnnnnnnnnnnnnnnnnnnnnnnnnnnnnnnnnnnnnnnnnnnnnnnnnnnnnnnnnnnnnnnnnnnnnnnnnnnnnnnnnnnnnnnnnnnnnnnnnnnnnnnnnnnnnnnnnnnnnnnnnnnnnnnnnnnnnnnnnnnnnnnnnnnnnnnnnnnnnnnnnnnnnnnnnnnnnnnnnnnnnnnnnnnnnnnnnnnnnnnnnnnnnnnnnnnnnnnnnnnnnnnnnnnnnnnnnnnnnnnnnnnnnnnnnnnnnnnnnnnnnnnnnnnnnnnnnnnnnnnnnnnnnnnnnnnnnnnnnnnnnnnnnnnnnnnnnnnnnnnnnnnnnnnnnnnnnnnnnnnnnnnnnnnnnnnnnnnnnnnnnnnnnnnnnnnnnnnnnnnnnnnnnnnnnnnnnnnnnnnnnnnnnnnnnnnnnnnnnnnnnnnnnnnnnnnnnnnnnnnnnnnnnnnnnnnnnnnnnnnnnnnnnnnnnnnnnnnnnnnnnnnnnnnnnnnnnnnnnnnnnnnnnnnnnnnnnnnnnnnnnnnnnnnnnnnnnnnnnnnnnnnnnnnnnnnnnnnnnnnnnnnnnnnnnnnnnnnnnnnnnnnnnnnnnnnnnnnnnnnnnnnnnnnnnnnnnnnnnnnnnnnnnnnnnnnnnnnnnnnnnnnnnnnnnnnnnnnnnnnnnnnnnnnnnnnnnnnnnnnnnnnnnnnnnnnnnnnnnnnnnnnnnnnnnnnnnnnnnnnnnnnnnnnnnnnnnnnnnnnnnnnnnnnnnnnnnnnnnnnnnnnnnnnnnnnnnnnnnnnnnnnnnaataataatataaaattattttctaaataaaaattattttttatgttgtctttcccgtggactaatttctatcatctgagtcattatggtatgcagtggcagtgattatggaaatcatacaacttaacaaatccacaatattgaaaagcttaatcctaccatgtgacttttaaatacatgtacataacatcttgctacaaagtcatactgattaaatcaatccgtacacaaccctctcaaaatattaccaaacctgtatcagtcctaattgttagtaactgccaatcagtcctacacatgatgtatgtgacaagaacagaaatttactaaacttcaattagaagcttccaaattcctcagtcagcctgtcattttgtttagctgaaaaacaattaagattatgtggaagtgtcaagataatcgaaccatgaatatcactatgcaagagacaatgagtcaatgacagctttatatgcagagatcatcaaccaaacttcgtatttgttatcatagcaaagtgtaagcaagactacccaattttagttaatatgtttatcattcacactctgttaaccccctttaacacttgtgaatgtgttcttaatgacatgggcatccttgacatactaagcatcaccttatacacatcaaataatgatttgagtacatataatacaatgcctatctaaattatcttcacaatgcaataaactgtgcattcttaatacgtgtgcatccttgacatactcaaaaccaccttatacatatcaaaataattatttgagtacatatataatgcaatccctatctaaattatctttacaacacaataaactgtgctaacaatttcctgtgctaacaatttcgatgacaataaagtaaaaagctgcactttaatatttaaacagtttaaaatttatacctttaattatagatctgaccattgcattcctgtgatccacagtagcagctattactcctatcgttgataaattttcccttggaattataatcaaaactcagctctctaccagcaggaatgtccttcgcagcaaacagcattttgtgaggaagattcttgtcatcatgatcatacataacatctttgacatggagattcggggaacagctatgatttataaatcttccaatgtttccacattttgttgcatcgatgaagccctttccaacacctgcaaaagcaaactgcaactttaaatgaaatccagacacaaaaggcataaataatggttcatgaacagatacccgtgtgaaatatatagtcatcatcaacatctaatccactttgtctactgtcacagacttctccaatgaactcacatacaaagcttccagaaggaatgaaagagcgtgttctaacaccccaacctttcaattctgtcatgaagatttccagttggaactggatcccatgctgacttactcggttgatgcaagaagaggagcacttgcaagaagggccacattcataaataagcaatgatcccatgggagaagcaagtctttttttacaatcatatgccattatcccaccattcttaataatgcaaacacatttgtcacgattcacacatccatcttcacaatcacagccacatggaattgttgcctgcttgaacttatctgaatagatgttcttaacaatgtaataaaaggatttgggtatatgaacacaatttgttaatgtcaccacccgaataggaaatttttcttttccttttgaaaggtcattaactcgaacaacatccttttggactacacttcctccagattggtgtctttttcttggcctagaacttccaagttgtcctgaactatcatcgttgcccataacatcatctttgagggcaacacaactttggggttgctctgaaatcctattcagtgtaaacttgaacacaagttttccaagtttccctctttcttctgtcatcttatccactaaatacaagccatcataaacatacaagtaatcaaaattgccgctaacttcaaactttttacaaaatttcagtataaccctcacaggactttttgtatccatgctattcttcagagccaaattccccccttgcaacttctgatcctgaatagaaacattactcttaacattgggatttcctccatgaccactgtaaaccaaggtaccattggatttcctagcattatcgtaacgattggttacaacaatgcttgtggccaacgagttctggcctgttcccatataatcaataccattccaaaactgccgatggaggccaatgacattgagttccaccctactttgaaagatgtcacctacctcaatgccaactatatgtcccacacgctttttatcgttctcccattgttgcttttgtctcatcatcattgctgcttccatcatagcttttgtcttcgcctttaaattcacaggttgagacgctttatactgatgattgagcttgtcaactaagttccaaaacgtcgccaatgcttgcttgaccttcctgtgttttacagacacttccttccttttcttgtcagatgaaggagtaggggaccattcttcatgccttttcccagaagactttgaatcatccatttctgtactcccaacttacaaataaaaactatgcaacagaaatatacattaatggtaccacaactaataaaagggtttagaatatagaaaccatgaggcataaataaataataataacaaaaatcacatccacatctcccacaaaaaaattaaagaaaaaatgaaagaagaaaaaaacattaaagcatgagtggtaacggaaagtatttaaatgctgaaaattggaagaatagaagggatcaaaattttaaaacttgaaacaaaaaaccaaaaaaaaaannnnnnnnnnnnnnnnnnnnnnnnnnnnnnnnnnnnnnnnnnnnnnnnnnnnnnnnnnnnnnnnnnnnnnnnnnnnnnnnnnnnnnnnnnnnnnnnnnnnnnnnnnnnnnnnnnnnnnnnnnnnnnnnnnnnnnnnnnnnnnnnnnnnnnnnnnnnnnnnnnnnnnnnnnnnnnnnnnnnnnnnnnnnnnnnnnnnnnnnnnnnnnnnnnnnnnnnnnnnnnnnnnnnnnnnnnnnnnnnnnnnnnnnnnnnnnnnnnnnnnnnnnnnnnnnnnnnnnnnnnnnnnnnnnnnnnnnnnnnnnnnnnnnnnnnnnnnnnnnnnnnnnnnnnnnnnnnnnnnnnnnnnnnnnnnnnnnnnnnnnnnnnnnnnnnnnnnnnnnnnnnnnnnnnnnnnnnnnnnnnnnnnnnnnnnnnnnnnnnnnnnnnnnnnnnnnnnnnnnnnnnnnnnnnnnnnnnnnnnnnnnnnnnnnnnnnnnnnnnnnnnnnnnnnnnnnnnnnnnnnnnnnnnnnnnnnnnnnnnnnnnnnnnnnnnnnnnnnnnnnnnnnnnnnnnnnnnnnnnnnnnnnnnnnnnnnnnnnnnnnnnnnnnnnnnnnnnnnnnnnnnnnnnnnnnnnnnnnnnnnnnnnnnnnnnnnnnnnnnnnnnnnnnnnnnnnnnnnnnnnnnnnnnnnnnnnnnnnnnnnnnnnnnnnnnnnnnnnnnnnnnnnnnnnnnnnnnnnnnnnnnnnnnnnnnnnnnnnnnnnnnnaaaaaaaaaaaaaaaaaaacttaccgaccacaaggaacaaaatttccgaccacgatgagcatgcaatgcacaaaacagtgaaacaagaatgcaaagatcataagcttcatcaagaaaaatcaaaactttgacgaaaaaagaaagagaaagagaccaccccaaagaaaaagtagtaaaaaacagaggaaaaaaaatgaagttttccgaccccaaggaacaatgttttcgaccacaaggagcatgcaatgcacaaagcagtgctacatggatgcaaaaatcattaacttcatgaagaaaaagcagaacttcgaagaagaaaaaacacccccaaagaaaaacaagtaaagagcgaaacacaacagaaaaaagatgaagtaaaacattcggagaaatcacaacccttttgttgtttgttgatgaactaaagagattaagaaatggaaacgaaaactgtgaaaatatagaaactaaaaaaacaaatacttacccttcttaaatgcttgaaagagcaaaacttactcggtactatcctggagaaaagataagactctgacgaagaaagaagatacagtcccgtctcactgtgcaacgtttcaacttcgagaataattataataattaaaatgaaatgccaaagtttcaacttcagaagaagaataactaggatttattgtttttaccatctcgatgtggagcaagtcacgctagacgtggtctagctaagttatacattttatatgtccgatgatagtcgattttgttaagatgaggatctccaaaataaataaaataactgacatttaagtcaaaaatatatatttgcatatatgaatactcaagtacatgggaatgagtatatcttgagtgagaatgaaatgtgttcaagtgtgtttagtgtgaataagtgtgttttgaagggtttgatgaaatatgtatttataatgtataggatgtgtcttggacctttttagataattaatatatagataaagactaaaaagtaattgcatattatagataattaaggttacataaaatttttaccttataaataatttgtagtttgtagataataactaatagataatttgaggcttatagataatccaatgcttttggataattagatacatgctaagagataagttagttacaatattgtattgtcataaaaaatatatgtggccatttatgtgggaccctcgtacacgtgtcaaccttctacgtccgtcctgctagagcccggacacactcccctcgacaatctggttgtttttctcaatacattatctataagcttatttattcaaatattattgataatgctgcaaccacatttcaaataataggtacctaattatctacaagctacagattatctacaagatacgagttatctacaatctaactatctacaatatgcaattatctattagccttatctataggttaattatttacaaaggcccaaggcccatgctccacactataaatacaggttccatctaatattctaaaagatcccattcatggtgaacacacttgaatacattcaaactcgttcacgtatacttgagcattgatataatcagatatatgtttttctctttatacagttgatgtacttacttgaacgtcggagtcctttcctttgttttgcacgtccccctcttaacaaggccgactcattgtccgacgtgcagagtctggaacccacctggaccacatccatccttatgcatggctcttccaaattctggtaagaacatttggcgtccactgtgggactgcgttaaaacttaccctgcggcctcgcattttccatcaatccaccaatggtcagtacgcgctctagtcttaagcgccacactcccattaacactttcaaccctcttcagacaaccatgaccaacgcagacactatttagcaactccaaaaccatattacggagatgaaacgcaccatgaagaagatctctgaaggctgaaggctgatcacgatcagctggaagctagagtgagacgtccctaaggtgtgagcacccgcctctcatagggaatgagcatactgtaacgacccgtctcgttgttatgatgatatcactactcttaaacttataattttcaaattttaaatgaaaactctattaatttgattgtgaaaatgaggataaatttcttgcgataatacactcataaaaaacgcacaaatacgtaaataaatacatatatatatatatatattaaacaaatacatatcattcatatgccagaacataattcagtttttacacacacacacacatatataagcttgagattacatgtccgatcaaagagaaacaaggaaccaactaagaaagagttgataacaaaacacaactctctcccaaaataaattccaatgttatcacgtcggcttggcggctttaacaaaaggatctttctccaatataacctattgttgctcatctgctcccacgaacgaaggttcacgatcatcacaggtaccaaccacacagtacaaaattgcaaggatgagtttattatacaagatcaacaagcaccagataacaatgattagcaagaaaataataatgataaccacaatcattctcagtaatgaatcagttcaacacgcacttaacaaactagtcatcaattttttccataattcaaatcaattatgctcataatgatgcatgcatgtgtctcaactctcaaatgcaatgtggtaccattcattaggaaatagcctaagtgtgcccacatgacactctcacttaggaaaatgatgtagtagctcgtcgaggtcactatgtcgtgcacaggccactccccccatgatgattagccagagtcacaagggagttccaaatagaatgatatgcccccaagtacctacggtacttactgccaccattctatttttatgcaattatgaagtatgaaacatgggtccatcaatgcactgaccgtggatagttaaaaatctaagcaatctctttccctctccagggatgcttaaaattcttaaactcaacatcttccctcccaggaatatccaacaggtcactgcacccccatgtacatacacaacatacatccatcacaatgacatcatcaacatcaacatcaatatcatctcaatctcaatatcatcaacaccatcaacatcatttcatttcaatatcatcgtcataaacataaatatcatctcatatcaatataatcatcaacatcatctcttattaatataatcatcaacataatctcatttcaatatcattaacatcacaaacaatcgcattctacatatatacatataacacatgtttgagattcacattcctgaggtcttcaaacaacacaaatctcatacattcacaatccataataccacgagactgatattttaggaaaattctaaattaaagaggagaactataatatacaaaataaactcatgcccatttaaaatttaataaagaagtaaataggagaatagattataaaattatgggcaaagactcctttgtaatgaagatttttcccaaaaaattctaatcatttaaacaacaacatcattcacaatctcactcatcaataaccaatatatcacatcccattagtttaaaacacaatttttcttgaaaaccagcacatgtaacacctcgaattttatgatgatctgagcatttattaaacatgttttatatatattattaatcagtagaactttctgatcttaagaatatacaattttaggagatatttgattgtttctcggacagcgtttgtacaagctgtataagttagaaatttcaaattgaagcagaataaggtgagacaggactcatacgataaagaataatttgtagagttagaaactatacagctgtgacagaaaaaccttagaatagaatttatatgaattttatacgataataactttgaaattttattcaggagaattcaggtagtagaaaaatatggaaaaatgataagtagaatcggtggaattttcacttaattgtaggatgtacagacttatttaataaaatggtttagtaattttgatggtcagaagtagaacggaccaatcagaattaagatagagcagtcttgtatgtaaagcctgtgtagcactctgtatagactgtttgtgagttatttgtactgtaactgatgtcagtttctggaaatctctagagttttattatttaatcttatcctttaggcagaagagttcgaattgaactttacttcctgctatgaatgccatgtgtgaagacaacttggaattgaattcttcctcttcatgaaagatggcatatgaacacaaggagaaccatacgtgaagaacggaaaccaaaacatggtgtagaaggaggtggggaagataaaaatcatccaccttggccatggtacccacgtgaagaaaggaaaggaggggaataaggtggttttgtcttattcaaaattgatgattcatgatgagtagaaaaatatcttaaggttcatgaattaaagtgataaggtgcaatcatgaaagcttaagaaatatctatccacttgtaagccaccattaatgaagggataagaagccatcataaccttgaaagatatttgtacaagatggcatgaaaggaagaaaaaatttctctcatttccccttgatggccacgtcagtgagggagtaagaatagaggagatttcatgatttaaatacatggggacaagtgaggacacttggaagagagttctcatgacttaggagatttttgttataagctagaagatatttagaagaataattatgagtttagttaggatgtaatggaatgagatgaaactaagttctaatggaaccaaatgagagtaactaattagaaagggtaattatgtctttaaatattttatcactttccaaatcatatataaagagaggagggcccttaagtggaagtcactttcaagactccctttctccaccaaaccccacgtgaatctctctccctcccatctcttttatttcattttcaccatttccttttcaaggcataagttaagtgagaagaggctccacttcccttaaggccacgtgtagaaggctagcacttttaggaaaagtttgtcaagctttgtaatgagttatcaggtatgtatagggaagttttatgataaggatagtttaagtgttacttgtgtttgaataagtgttcgaagttttgtgaagtatgacttgtatctaagtaattgttggaattaagttatagttatatgattgagtgcctgaatgaagttttatatttgctgagtgttctatgaatctctgtacatgaatgatatgttgcgttttcgtacacaagtaataagctaagtttggtacatgatttatgttgaatttctaagtaaattatgtgagatagtgatcggagactgatgttgaaaataaatctgagtttataaaatgaaagagatatgcataagtgaataagtctcatgtgtctcatagagttgcctcagagaggaggtgtgcctcaaagaggaggtgtgtcagatagctgtaggaacggagtccgtgcgttcaggcagaagggtctgaacttgggggtgactcttgcggttggaaatcacgccacccatgatgatcacatgagtgtgggtgagaacctgtgcaacacggggagaccctaattgatcggagaagttctgtgccactaggatggggttatcttgacaattggtaccacatgttcatgatgttgagagtttgggagaatcatgcatcatataaaattagaactgaaatttgaagatgttgttataaataactgcacactgaatataatctgttgcttaaattatgtttattataaaacttaccctgtgttttatgtctgtggttgacacctgctatgaccttgatttccattcgggtgagcagatgaacagtaaagagagactgcctagctgcttacaggaagaggattttgtttgaagatgttttgtttgaagatgtattcttttatttcagaatgttttagttatttgtactatgtaatagaactagtgtcagtttgtactcttattatatgttacttcaggtttataaatattagttagtgatgaaattttcttggagtatcagttattgggaaaattttgtaatattcaactgggtgctcttaagtaagttgaaaagaattttcattaaaaatcaataataacaagattgtaagttgaggtgttacaatagtggtatcagagcaaggttgtttcttaggactgtgtgttatgtgtttgttatgtttctctgcaatatgttctgtgttatatgttctttgtattttgctatgacccgtgtactgtgttttctataatatgctttttggaaaataggagtaggaatttagagtactaatctgttgtgactgttcaggaaaatgaaccccataaataaaaccttctatgtagttgatacccagtgccgacgggaggagtcggaggaagccagaaatacaacatatttcactactgtgaaatatagagctaatcctgataatggggaacctccgattactaaagaggagcatgaggtcatggttataccttggaccatagaaaggaaactttatcgcaagaaagactattatatatattatgggacggaaaaaccagatagtatttcggcataccatgtacaatattaccaagatatagtggtagaagaagtaggacagaacttttagaaactaaataaaatgactttttggtgtgataaatagtagtattagaagtagggatagttatgattttagaagtgatatgtaaaatatctgaaaatgttttgtaccaataactttctttatataagttgtggttgttgtaaaatttctatgagtgtgttactatttattatttcctacccattaactcaaacttatgttgttttagcaagaagtaatggctggtaagagcaatcgtgccatagctgatgcgctgcaagccttagcgcaggcgttgggaaatcaaccccgaggtgggggtacggagtatcaagggttagagagttttcaaaggaaccacccgcctacctttaaaggaaggtatgatcccgacggtgcccagttatggctgagggaccattacaagaatgttggacctattagaaataaaatgatgagccgacaaaactaggggaaaccctatcataatagggatcgcccgtgtgctttcaatcccaggaacccggccaataaaacttcctcatcccttcatgtaaaattcttcaagtgtggaaaacctggacattttgtttccacatgtccaaattcaagtccactatgttttgtgtgcaaccaaagggggcatatctcaaggaattgtcccttgagtagtaaaggggagaaaggaagaagtcagagccatcctttagagaaaccagaagctacgagaagagtatttactcttagtggggttgagacttctaaatctaaagatttgatccaaggtaagtgtttcattagtagaattcctttagatgtattatttgactcaggagctacttgtaacaagctgaaatttcaataactgtaaatgtatggtcaaaatgtttcttgcacaactatttgatatgagtgttaggttatgtgagacttgattgatctatatttaagttatttgggtgaaatattaattagagatattacaaaaatgtttgaagagaaatgaccatattacccttcccttaaagcagaaagtacaaaaatgcccttgagatgaaaattacgaaaatgtccttgatatttagaatgaaaattacaatcatacccctagggtaaatgacaaattaccatggtacccttgaagctagaattaccaagacaccctttgatattttgtgaaagcttgatgaaattacaaagtgcccttggatgatagattaccaaaatacttttagtgacagaaagcctcaaaatagaatttctatgaattttatatggtcgtaaatttgaaatcttattcaggagaattcaagcatcagaaaaatatggaaaaatgataaatagaatctgtggaattttctcttaattgtaggatgaatagacttataaaataagatggtttagtaattttgatggttagaagcagaacggaccaatcagaattaagataagagcagtcttgtatgtaaggtctgtgtaacactctatatagactgcttgtgagcaatttatactgtaattgaagtcagtttctggaaaactctagagttcttttatttaatattatcctttaggtagaagagttcaaattgaactttacttcctcttaaggaatgccatgtgtgaagtcatgttggaatcgaattcttcttcttcatgaaaggtgatatatggatacaaggagaaccacacaattttcttctctttaaggaaataaagacatgataagtagaaaaatatcttaagattcataaattaaaatgataaggtgcaattatgaaggcttaagaaatatctagccacttgtaagccaccattgatgaagggataagaagccatcataaccttgaaagacatgtgtacaagatgacatgaagagaagaaaaatcttctcttattccttcgtgattcacaacaaaatattagaaaatctaaaaagaatgattcaagataaacactacctatgatcctttatgcatgaatgaatgaaaatgaattgagattaccacacattccaggtagtatgaattctaatgctcaaaatcaatatcttgaaaacttcttttctttaacatatcttctctaaaaactcagaaatcttgatcttcacaagatgtgttattcactaggaaatcagtctcttgaacacttagaaaggttggtgtcttttgggtaagtcactcatatgtattgaataattcgtacaaggtctatttataaagagctgacccacaaagctttataaaaaaaaacttatttaactgacaaaaatcgattaatccgttggtgtaatcgattgttttgtcatatgtaatcgattaaaacaactaaataattgattaaattgttccttagttttctggaaaaagattacgaatagaataatcaattattactcaatgtaatcgattaaagcaaaaaaacatagttttgtaaaaagcctgtgtaatcgattacgattaatggtaatcgattaaagcagcaatgtatgattttccaaaatgcactatgtaatcgattaaaccaagcttgtactcaattaaagtgttcttcatggcttttctagatttagaacaaaagcatttaatcaattaaaacactgtgtaatcgattaaaacaataagttttcatttttccaaaaacttagccatgggaacttaatttcttttgaaatcatttagcagctttcatgttttattgcacgtatgtatgcaagttaaatgggacatgcaaattgcaatgcaaggatcacaaagtaatgtacttgaatcaaacttaaacaaatttcaaatgtcttcatacttgattgggcatgtaaaaagcaaaaatatctttaggcaaccatcaagcttcttcttcattcttactttgactcttcttgcaactcaccctatattcaacaatctccccctttttggctttgagcatgccaaatatcaattgtccatttgtttaatgtttgattgcttttgagggatgaatgatagaagaattatacttgatatcctgaaatttaaattagcttttgcaagaacaatagttaagtatataatgctttaaatttgctcaccctgacttgtataatttctcataaaaatacagagcaaacaaacagagcacacatcacaaattatttctccccatttaaacaagcagagttatttcttttttatctcgccctatgattattacaattatttctccctttatttggcttatcaaagacaaaaataatgttcacagagagaatattaagaagagaaaacaaaacttatattaattgatagtgaaaatactatgaacactcttcaaataaccaagagggggggtgaattggttattaccaacttttaaaaacttttcttgaaaacaatttgcggaattaagacaaggatcgtatcacacaatcacccttaatcaaaaataaattttatttcaatctaatatgaccatgaactgcatgtaatgaatgaaatagctcttattgattgtcaattgatttccaaccaaaaaaaatgaaagatatactgataaagattaaaacacacaacaatttattctggtccacgccacaaacatggaggctacatctagtgtcttccaaccaacactaggtcagagtttccactaaatcaaaatatactttacaagcaatttacaaaaggtttcccttgtcaaacccagacaaagaatcaaaatctaaaccccatatatttctaagaccaagaaccagagaactctactatgttctaccctctagagaacccttctccagaatgcttgatagaatcaaattgatttatcacaaaagaattacaaaacaaatcattaaactcttaaaaagaaagattcaagatagacataacctgggatccttcatgtatgaatgaatgagaatgaaatgaattaccacatgttccaggttgaatgaattctaatgcttagaatcactatattgaaaaactcttttcttcaacacatcttcattagaaaaaaaaactcagaaatcttgatcttcacaagatgtgtttttcactcagaaatcagtctttagaactcttagaaagcttagtattctttgtgaaattcgctcatgtatattaaacaattcgtacaaggtctatttatagaaaacagactcaccaagctttttataaaacagttttaactaacaataatcgattaaatcaatgatgtaatcgattattatgcttatataatcgattaaagcttctaaatcatcgattaaattgttcctcaaatttctagaaaatatttatgaatagaataatcgattattatgatatttaatcgattaaagcagcaaagcattgttttctttttggcttatgtaatcgattacaatgaatggtaatcgattaaagcagaacaacatgtttttccaggtatagcctatgtaattgattacaatgaatggtatgcacgattttgattttacactttgtaatcgattataagaacactgtaatcgattaatgtgttcttcatggcttttccagatttaaaacgaaagcatgtaatcgattacaatactgagtaatcgattaaaacagcaagtttttcatttttcaaaaacttcaaccacgagaacatgaactttgaaaaatcatttaaacactttagtttattaatcaaagacatgtatgcatgaggatgagaatgcaaatgcaatgaatgatcataaggaaatacacttgagccacttagataattacaaatgccatcaaaatgattgggcatgtaaaaaactaaaacttcaagtcatccttgcttcaatcttcttgcagcttcctttaaatccaacaatctccccctttttggctttgagcatgccaaatttcaattgttcaattgtctatcctttgattgcatttaagggatgaaggataggaaaattatacttgataatcctgaaatcaaagtcatccttttgcaagaacaagcataagcacaattcgttcctcataagcgctccccctcacttgggcagtcagagttatttcattattgcatttctccccctatcattattacttatcaaaacaattatttcccccctatttggcatatcaaagacaaaacaaatacttatagagagaatataaggaggtgagaaacagaactttcattaattcaaacgatgcattacattaatcagtaataaaaagaaaacatagtaaatcataaaacacaacaaatagaaaaaaaccatagcaatcctaaaaggatttagaatcatcaaggataagcctagcttctatgttttctaatctagatttcatctcttccaaagatgaatttgtttcagccctatgcctatgatgtagagatagtagagcatccatcttccgaatcatgagtgattcaaaagggctgtaggatgatggagcagagtcttcagcttcttcttctacttctacacagcttcatcttgttcacccgcaggagggatttgttgaccaaccatttgccatccatagggagtcttaaccatcccaagcttggtaagatgttcctctttgatgaggatgttactggagtttgtgttgtcaacaacctcattggttacatctattttaaagtaatcaatgaatctggacaccaacacaacataaggaaatggataattcaccaatcttttggatttcaacatgatttcctcaagagtgaggatccagttcatctgaatagaatttttgatgccatacacaagttgtatgtcatcatctgtggcttgggcatgattagtggacctcggagtcaagatgtaggtgatgatataatgaaaaagtctatcttcatgggtcatagggccaatgctaagcctcagcttcagcctcatgtgaggattaagaagcattcctctataggtatccaccctattgtaacccctgacttcctcctcaaatttcctttctcctacaaaggaaatgccagccacttcttgccaaactttaggggtgatttccatggctaccccattaacttgagacaagatagtcccatccattgaagcctttgcacaggtgtaaaacacctttacaagtttagggtaaaaagtacccttcattttaacaagtttcttcaaaccctgtgcttcaagcaaagcagggaaatgaaaaccttctctagtgaaccaggtaaggtaaaggtgtttgggagggcagacaagcttagtagcattaaactgtaggtaagtccttttgtctttctcagaaggaaaccaatgatctaacctagtaactgtagggttagaggtttcaacagcttttctcttagaggttttaattctcttagatgtggacatggtgaaaacaaatatagacactacatggcagagtatctagacttagaaagaagatagaaaagcacaactaggcttaaaaaaaagaagagaatggtgtgattttctctttcaccaaaagttgtatttatagatattttgggctccaaagtttgaaatttgaaagtataactgtcatttcgaattaacccattatcataaaagctcagaattttaaattttgaattttatagcagttggacagttacaattttcaaaaaaatctgtcagattttgcaataactccatgaataatcgattacgagcttatgcaatcaattaattcgtaagcaaaattgtttttacagagagctataatcgattaacacgaggtgtaatcgattaaaccaatgagatttagttaaggaagatgaagtgtaatcgattacgaattgtggtaatcgattattccagagagaaatgatttttcagaaggtttttcaacttgtgtaatcgattaattcgatctgtaatcgattattccagtgaacgtcaaatttaaaaatatgaaaaataatcgattatgacacttatgtaatcgattacatgagttcaaaattcaatctgaacagtttttagagctaatttaattgattatttcatggcttaatcgattaaaatggagaatttatcagaatgaacagtgaatatgtagcaaatttctaattgaatgcttttgtaatgaatgaataatataaggttcatttttcttatagattatcacataaacaacatgctaacacacattagatttatctagtattcctagcatgtttataagtgaatagaatctatctcttgctaagggtttggtaaaaatatcaactaattgattttcagtttcaacaaactcaattttgatattacccttttggatgtgatctctgataaagtgatgtctgatttcaatgtgtttggtccttgaatgcataataggatttttggaaatgttgatagcacttgcgttgtcacatagcaggggaatttcttgtagctcaacaccaaaatcttgtagttgttgcttcaaccatagactttgtgcacaacagcttcgagcaggaatgaattcagcttcaacagtggaaagggttacacatgattgtttcttgtaatgccaagaaatcagtgagcttcccaataaatgacatgttccactagtgctttttctatccaatttgcatcctgcaaaatctaagtcagaatatccaattatgcttattgatgtacctttaggataccataatccaacttttggtgtggatttgagatatttaagtatcctttttactgcaataaaatgagattcctttggatttgcttgatatcttgcacataagcaaacacttagcattatatccagtccacttgcagttaagtataacaaggatccaatcattcctctgtactttgactcatcaacactttttcctccttcatctaagtcaagataagttgatgtagccatgggagttgcagcatctttgcatttttccatttcaaatttcttaatcatttccaggcagtactttgattgacttagaaatgttccattcttcatttgcttcacttgaagtccaagaaagaatgtcaattctcccatcataggcatctcaaattcactctgcatagagatagagaattccttgcacatagactgattagatgaaccaaatattatatcatctacataaatttgaacaatcaaaatatcattgcctcttttcttgatgaacaaggttttgtccacttgtccttttatgaaacattggtcaatcagaaattttctcatcctttcataccaagaccttggagcttgtttcaaaccatataatgcttttcttaatttgaaaacatgatttggatgtttaaaatcaatgaatccaggaggttgatcaacatagatttcctcatcaatatatccatttaaaaaagcatttttatcatccatttgaaacaatttaaaactcattaagcatgcataagcaagtagcaacctaatggtctccaatcttgcaactggagcatatgtttcatcataatcaatgtcttcctcttggttgtatcctttagcaaccaatttggccttgttccttgtgatgttacgattttcatcaagtttgtttctaaaaatccacttagtgccaataggtttatgagaagaaggtctagaaactaattcccatacttcatttctcttaaattgatttaattcttcatgcatggccatcaaccaatgttcgtcaagtaaagcttagtcaatgtcttttggttcaatctgtgaagcaaatgccattgtacaacaattcttaaagaggatctagtagatactccctttgatacttcccctatgatattgtcaagagaaagatttttagtggttctccaatccttttgctcttgaatgagtgttgaatgtttcacattgtcatttgaatcaagctttatcttttcattaaactgcataacatcttccaattttcctgcatcctcatcacatactttttcctccttggaggtgttagacccatcacaaattacatgcactgattcttctacacatagtgttcttttattgaagattctatatgctttactttgtaaagaataaccaaggaaaatgccttcatcagctttagcatcaaatttttgccaagagattctttgccattatttaaaacaaaacatttgcagccaaatgctcttaaatgtgaaatgtttggcttccttcctttgtatagctcataaggtgttttcttcaaaagaggccttataagtagtttattcaaagtgtagcaaacagtgttcactgcattagcccaaaaatattttggcaaatttgtttcattaagaagagtctagcacccttttcaagggatatgtttttctttccacaacaccattttgttgaggtgttcttggagcagaaaaattgtggtttattacatattcttcatagaatttttcaaagttttcattttggaattcaccaccatgatcacttcttattgaaacaatgctgcaagctttttcattttgaatagttttggctaatttccaaaatgctgtgaatgcttcattcttggttcttatgaacaaagtccatgtgtatctagaaaaatcatcaacaatgataagaccatagtagttgcctcctaggctcattgttcttgaaggaccaaataaatccatatgcaatagctcaaggggttctgtagttgaaactacatttttgctttgaaaacaattctttgtttgtttctccttttgacaagcatcacatattttatccttctcaaacttgagcttaggtatgccaattactaagtcttttctaatgagcttattcatgtgatgcatgttcaagttgaaaacaataggaatacccacaataaccaagagggatggtgaattggtttaaacttggtattttaaaatttatttataaaatcagagtcaaaggatcttaatcacttttaaaccaagaacacttctaatcaatcaaatcactcaactcaagaaatcaattgctcaaaacaagacttgttgagtaatgataataattccaagaacaaatgaacaatataactaataaagataaaggaataaaaacaacacaagaatttatactggttcacttctcaagagaagctatatcaagtttcttctaataaacactagattagagttccattattataaatttcagttcttacaagctttataccaaacactctttatcaaccctagataaagaatagaaatctaaaaccctattagactcctagtgatcaagaaccagagaacactactctgttcttccctagagaaccctactctagcataagcttcaaagaactctttacaatagcatcaaataataaaaattacaaaaannnnnnnnnnnnnnnnnnnnnnnnnnnnnnnnnnnnnnnnnnnnnnnnnnnnnnnnnnnnnnnnnnnnnnnnnnnnnnnnnnnnnnnnnnnnnnnnnnnnnnnnnnnnnnnnnnnnnnnnnnnnnnnnnnnnnnnnnnnnnnnnnnnnnnnnnnnnnnnnnnnnnnnnnnnnnnnnnnnnnnnnnnnnnnnnnnnnnnnnnnnnnnnnnnnnnnnnnnnnnnnnnnnnnnnnnnnnnnnnnnnnnnnnnnnnnnnnnnnnnnnnnnnnnnnnnnnnnnnnnnnnnnnnnnnnnnnnnnnnnnnnnnnnnnnnnnnnnnnnnnnnnnnnnnnnnnnnnnnnnnnnnnnnnnnnnnnnnnnnnnnnnnnnnnnnnnnnnnnnnnnnnnnnnnnnnnnnnnnnnnnnnnnnnnnnnnnnnnnnnnnnnnnnnnnnnnnnnnnnnnnnnnnnnnnnnnnnnnnnnnnnnnnnnnnnnnnnnnnnnnnnnnnnnnnnnnnnnnnnnnnnnnnnnnnnnnnnnnnnnnnnnnnnnnnnnnnnnnnnnnnnnnnnnnnnnnnnnnnnnnnnnnnnnnnnnnnnnnnnnnnnnnnnnnnnnnnnnnnnnnnnnnnnnnnnnnnnnnnnnnnnnnnnnnnnnnnnnnnnnnnnnnnnnnnnnnnnnnnnnnnnnnnnnnnnnnnnnnnnnnnnnnnnnnnnnnnnnnnnnnnnnnnnnnnnnnnnnnnnnnnnnnnnnnnnnnnnnnnnnnnnnnnnnnnnnnnnnnnnnnnnnnnnnnnnnnnnnnnnnnnnnnnnnnnnnnnnnnnnnnnnnnnnnnnnnnnnnnnnnnnnnnnnnnnnnnnnnnnnnnnnnnnnnnnnnttcttacaagctttataccaaacactctttatcaaccctagataaagaatagaaatctaaaaccctattagactcctagtgatcaagaaccagagaacactactctgttcttccctagagaaccctactctagcataagcttcaaagaactctttacaatagcataaaataacaaaaattacaaaactgaatttacaaccaaagataatggagagaaacaacctgatgatctaatgaatatgaatgcatgtgtggtttaccaatcagagttaaattgcagaaaaggatttcataacatgctctccaaaacttctttgaaaacttttgcccaagaaatcattcaatacccatgaagattaaagagtgggacaagaacttagttaacccagaaaatcactttctaactttgagaaggcttgtgtatattcaaaaaattcgaagtattcaagttagtttttcagacaagcctttatcctatttatagcagctttttgtaacagattgtaatcgattacaacgtgccaaataatcgattaaaatgacttatgtaattgattaaattgtcacttaatcgattaaagtgttcaaagcttcatcctgggttttacaacaaacagaataatcgattaacccgagctgtaatcgattaaagcagtggagtttatttgtgaagcaagcttgtgtaatcgattacaatttatggtaatcgattaaagcagtaaggcatgctttatgtttttactatgtaatcgattacaaaagttatgtaatcgattaatatgttcttcaaggcttttccagatttaaaagcgaatcaaataatcgattaaaccgatgtgtaatcgattaaagcagtaggatttcatttttccaaaaacattacccatttaattactttttaaaaatatgaatagctttgatactttaatgaaaacatttaagcatgttaatgattatgtgcatgcaatgcaaggatcaaaagattggcctttcatacacttcatttgaagtacaatcttcaaggcatgtgaaaagctcaaaactttcttctaaatcacaatcttcatcttcttgttgctccccgtatatccaacacaagtgacttgttcgtctatgccataaccaagtgtcattagttttactgattaggcaattagtattgtgaataaatgcatgctcaattgaaagtacataaatgttaccttttctcttcccaacatgtataacctcaccattttggctatcacgtatcaaacaacaattgttgttgaaggagccattgaatcctttatcacataattgacttatgcttaaaaggttatgctttaatccttcaacatatagaatatttctgatcattattctaatgttgtcttctatattgccttctccaattattttgcctttgttattatcaccataagtgacaaatcctccatcctttagtttgacatttgttagcatggatatgtcatctgtgatgtctctagagcattcactatcaaggtaccatattgatgattttgctctaagacacacctgcaaagttcaaatcaagtggcaaagaaaggtacccaatggaggttgggtccataagggttatctattttctttttctttggcacccaaatgcattctccatttggtacataatattttctagcaaaacacttataagatgtatgccctcttttcatgcaatagttgcaagtaagagcttttgatgatttttcaaagtaaacattttgattaaactttgaattataaaaactcctttgattcttctgttttggtggtacaaatacagtttttccaaaacgttttgaaccttgtttgtaacccaatccagaagtatctccggcatatttttgcacacttagtatttcagttaagttgcattttcctctatagaaatttttcaaaagatcaatcaaatagctattttcagaaagtagtaacatgtacttttctcctgaacttcttttgaaatcatcaaactcttcttgtaataatttgcaattttcaatcttagaggaggaagaaggacatgtacacccattagccttgtaatttgaaagaagcttttcattctcttctttcaatttacaaaggtcactttgcatttctgcaagtttggtaatatgtcatcttaaatctcctttaagcttgttattagattttgttaacttttgagcctcactatgcatatcatgaaatgcatcaacaatttggtcgtattcagaatttacctcagattgagcactagagaactcttcatcatcacttagagtcgatgtgaaacaaacatttgcttcttcttcattttcactagctgatccagatgttgttgattcattatcttcccaagcaatatatgctttctttgacttagtctcttttctactccttctttcaccttgttgcttctttagaaagatacgacaattagatttgatgtggctaggtttaccacattcaaaacatgtgaagttagtggatttattgttgttgttgtcctttttgctgatgaactttgttggctttctattttcattcctcttcataaacttgttgaacttcttgattattagattcaggttttcatcactttcatcttcttcacttgaatcttcttgtttctccacactcggtgatgcagcttttaatgctatactcttttgttttttatctgcattctcagaatgtgttaattgagacatttctagctcatattcaagtagcttaccaaaaagtgaagccatagacatttttgagaggtctttcgattctttgatagctatcaccttaggttgccatgatctcgtaagacattttagaattttgatgtttaactcttcaacaccaaaggtctttccaagtccaagaagatgatttactatgcgagtaaaccttgtttgcatttgagatatggtctctgtggaattcatcacaaacatctcatactcatgaatcaaagcgtgtttccttgatcttcgtacatcttttgtaccttcatgagtaacctctaacatatcccacatttctttagcacttgtacacctaacagtcctgaaaaactcatcagaaaaaagtgcagaggtgatcatatttttagccttaaaatcatattgcactattcttttttccgcatatgacatttcatcccaatctttgggaatcaatttaccatcaatagttttcattgggaccaaaggacccttttctatagcattccatgcacccgagtcattagattgtatgaaaatcttcatacgagttttccaaaagctaaaatgctttccctcaaacatcggtggatgatttagggaggcaccctctttgaaagtaatctgagtggtattcattttttatgaaagatagtgatcatgaataaatctcaagaacctgctcttgataccaattgaaaatacaatgaacacacttcaaataacaaagggggggggagtgaattggttaagacaatctttaaaattttttctttaaaacaatttccagaattaaaacttggatcgtatcactcaatcacccttgatcaaaaacagagttttctttcaatctaaaatcaccttggagtgcatgtaatgactgaaatgattcttgttgattgtatattgatttccaaacaatagtaatgaaagaaatacagataaagaattcaacacataccaatttatactggttcacctcataaacttggaggctacatccagtgtcttccaaccaacactaggttagagttttcactataacaaattattcttttacaagcacagtaagtgacaatctctatcaacaccagacaaagattctaaattctaaaacactattagaatacaaatcacaaagatcttgagaaacctactcagatcttcaaacctagagaaccctactctagaatgctttaaaagaatcaatttgaaatattacaacacaacaaaatattagaaaatctaaaaagaatgattcaagataaacactacctgtggtcctttatgcatgaatgaatgaaaatgaattgagattaccacacattccagatagtatgaattctaatgctcagaatcaatatcttgaaaacttcttttctttaacatatcttctctaaaaactcagaaatcttgatcttcacaagatatgttattcactaggaaatcaatctcttgaacacttagaaagcttggtgtcttttgggtaagtcactcatatgtattgaataattcgtacaaggtctatttataaagagctgacccacaaagctttataaaaaaactgatttaactgacaaaaatcgattaatctgctagtgtaatcgattattttgccatatttaatcaattaaaacaactaaataatcgattaaattgttccttagttttctggaaaaagattacgaacaaaataatcgattattactcaatgtaatcgattaaagcagaaaaacatagttttctaaaaagcctgtgtaatcgattacgattaagggtaatcgattaaagcaacaatgtatgattttccaaaatgcactatgtaatcgattaaaccaagcttgtaattgattaaagtgttcttcatggcttttccagatttagaacaaaagcatttaatcaattaaaacactgtgtaatcgattaaaacagtaagttttcatttttccaaaaacttagccatgggaacttaatttcttttgaaatcatttagcagctttcatgttttattgcacctatgtatgcaagttaaatgagacatgcaaattgcaatgcaaggatcacaatgcaatgtacttgaatcaaacttaaacaaatttcaaatgtcttcatacttgattgggcatgtaaaaagcaaaaatatctttaggcaaccatcaagcttcttcttcattcttgcattgactcttcttgcatctcccccaatattcaacagttcataccctcaatatccatttaatattaacacatatgaatcattttttctaacattactgatgtacacattaattcaccctgaatcgattcctcgcattagaataggagagttgtaatgacccgcctcgtcgctacgacatcacaaactctagatcatgcaagttcaaattttaatatgaaaactccattaatttgattatgaaaatgatagtaatttttgtttgcaataataccattattatacacacgatacaattacataattgaatacacatgtatgcatatattgaaccagtacatatcatttacatatcaacacttaaaatgattttacatatatttacacctggaatcttacatgaccaacaaaaagaatcgatgaactaactaagaaagagttgattaacaaaacacaactctctcccaaaaagaattccaacgtcatcacgtcgacttggcggctccaacaaaagaatctccccccaaggtcacttactgctgctcatctgctcccacgaacacaagttcgcgatcatcacaggtaccaaccacacggtacaacaaatgcaagggtgagtttattatataaaaccaacaagcatcagataataacatttagaaaggaaacaacattaacaaccactatcattaccacaagtccatcagtccaatacacactcgacaaacccatcattccattacactttaagaaatcaatcatccaatgcattccacaactcaaacaataatgttcagaataatgtatgcatttgactcatcacttagcatgcaatgtggtaccatcctcatgaaaatagcctctctcaggaaaatgatgcagtagctcgtcgaggtcaccctgtagtgcactggtcgctccccccatggtgatcagccttgagtcacaagggagttccaaacagagtgatgccccttgtacccccgtacttactgccaccattctatttccatccatgaaatatgaagtatggacatgagcatcatcaatgcaattgtaacgcctccttttactctctcgtgcttgattgattttagatgaaatcttgtgtccactttgtattagaattatcttagttataaatttcatgaaaaatttcttccttcttgcttcaatttttcctttcattcgtaacataaacggttcttcctcaccacggttgatttataataagaatacagtccatgatacagtcccaagtacagtatccaaaataatatacagacgacctaacacaaattacatgccacagaaaattacaaatcacagcatacagtccatcaaaacttcttcatcacccttcttcaatatcatctacagcttaggtttttcctgttcctctgctcgcccaaataaattggggtcatcacaggtgtcaaccacagacacaaagtagggtaagtttatgataaatataatttaagtcacaaaatatatacagaaagtcatcacaacatatacagaaagtcatcataacatcatcaaaataggcttcatgcttatctgcttatcttaccacgaactttagcccccgtcaggcaaaatataaaataacacggacttatgcccccgccaggcaaaatagaaaataacacggacttatgcccccgccaggccaaatataaaataacacgtcaacatgaatctaatacagagtttaatatatgtatagaacaatatataaacttctttacacaaaatcccaattattcaaccacagtccacttcatagatttctcagaataaatcataatttacacaactcaaatagttcatcatactaatcataattccatcatacttttaatataacatttaataagtaaacttaagagtttagagcaccataaacaactcataaacttttagtgaaaatattcctttatataattaccattcaaatccactacttccttagatatcatcatgtaccaagattaattaaacaattacctattaagctaaattttaattattcatactaccaatcttttattaaacaagattaattaatcaattcattaaaccgaccttagttctttgaggcaattaatcatacacctaataaacaaagcttaattctaaagtaatttgaataatcctagcatacttaaaccatatttatcataaacttcccataccttattgttctccttaaaatttgaatagccttgctcctagtatcccttggtcttcacgtgagaaattaagggtggaaggccttggttttgctttgtgtgaaaggaatgaaatggaagcattttaggtgaggtttttgcacgtggaactcccttaaggacagccccattttcggttcatatcaccctttatatagtgattttgctacaaaaatcttctttgagttatgatagcttgctttatacttggtttaatttcattggctagtaattctcatccctgcaagtggctagtttcttgaggcttccacacccttctcctttctcttcttttcacatggaatggccaaggcttggagtaaaatccttctcttgcttcctacggtgacatgctagtttttagtggaaaatatcttttaaaccataattaccttatctcttgattttcattggctagtcattctttgaccaagttcttgatttttctacactattctccctttagtctctaattgcacgtatactcccttggcttggagagcaattctcaattgcttctttgcttttacataggaatagctagctttgctacaaaaatctttctaagttatcattgctaactttccactaggcttcattttattggctaagcattttgcaccctccaagtgtcctagttcttgagttttcttaaagctttctccattgattttgtatcacacggtcaaggctttgatttagggaaccaaatcaacaaatttttcttttattacatgtaatagccaaattctaatttcttattggtccaatttgcttttaattcttaaaattgctaaactgactcatttaaaacacttattcctctcataattaagagaaaatcctatagattatgttcatactttttcttacaattttctgatacctgaggtagtctagattaagctcttttcaaaatatcttccaaaattcacagaaattacaatttagggtttcttgtctctaactatgtcaataatttattatctaaaggtattttatccattttctgggtttccaaaaagtttctaaagtcatctggtcatttttgacctaaagggcattttggtaattttgccactcaccctaggggtaaaatcgtcatttccaaaagatgttcagggtatctctgaaattgtcaccccaagggtatcctagttatttccaaagtattcaagggtatttataagatttcctccttaagatatcttgctaaaatacctaggggtattttggtcatttacaaaatgttcaggggtattttcgtcattttccctaactttttatactgcctctcattaacattttaccctagtaattgactgtaattcccaaaattttggagtgttacagcaatgaccgtggatagatagggaccagaattttaaacaatccctttctctcttaggatgcttaaaacttgtaaacccaccctcgcaaggttattcagtcatgcaccccccatgtacatacataacatcatcgatacactgaccatggatagatacggaccaaaattttaaacaatcccattctctcttaggatgcttaaaattcgtaaacccaccctcgcaaggttatccagtcatgcacccccatgtacatacacaacatcaccgatacactaaccatcgatagatagggatcgaaattttaaacaatcatattctctcttaggatgcttaaaattcgtaaacccaccctcgcaaagttatctagtcatgcacccccatgtatatacacaacatcaccgatacactaaccatggatagatagggaccagaattttaaacaatcccattctctcttaggatgcttaaaattcgtaaacccaccatcgcaaggttatccaaacaatcaatgtaccccacgtggacatacacaatatacaaccataggcaccatcaatgcactgactatggatagctagggaccgaaattttaaacaatcccattctctcttagaatgcttaaaacttgtaaacccaccatcgcaaggttgtccagtcatgcaccccccatgtacatacacaacatcaccaatacactgacaatggatagatagggaccaaaattttaaacaatctcattctctcttaggatgcttaaaattcgtaaacccaccctcgcaaggttatccaaacggtcaatgtaccccacgtggacatacacaatatacaaccataggcaccaccaatgcactgactatggatagctagggaccagaattttaaacaatcccattctctcttaggatgcttaaaattcgtaaacccaccctcacaaggttatccaatcaggcacccgtcatggtattcatgtatatccacatcacacaatgacattgttcacatcaatattatttctcatcaatgtcattatcaatagccacatcatgtaatctcaatgtcatcaataacatcaacgtcatttgtaacgtctcaaatttaccatcttattatttagtgatcattaatgaaaattcttttcttcttgcttcaaaatattaaactaatgttactaataactgatatcacaaaaagattttcatcactgattagtatttataagtctgacataatgtaaaataaaatacaaactgatatcagttctattacatggtacaaatcactaaaatattttgttacaacaaacatcttcaactaagcatctttaacaaaatcctttcctcagaaatcagcttgccaatccttctttggggtcatagcaggtgtcaaccatagacacaaaaatacagggtaagtttatgataaacataatttaagcaacagaacatattcaatatatagatattcacagcaacatcctcagagatgcatgattctcttagactcttatcatgatgcatgattctctttaattctttcaatatttggtaccaattgtcaagatagcttcatccctgtggcacagaacctattcgaccagccaaggtctcccggtgttgcacaggttctcacccacactacatgtgatcatcatgggtggcgtgattccccaccgcaagagtcaccccctagctcagactcctcttgtctgaacactcaaactcagttcttgtagctatctgacacacctcctctctgaggcacacctccactctgaggcaactcttatgcacatgagacacatgaaactgattcacttaatacataactctttttatatgcattttaacatcagtcctcaatcattgtctcatatacttttactcagaaattcaacatatcatttgagtatagaaattcataaaacactcagcaacacatgaacttcatagagattcataggaacacttagcaacacatgaaacttcattcaagcactcaatcatgtaactataacttaagtccactaatttctcagatacaagtcatactacacagaacttcaagcatttattcaaacacaagcaactttaaactatctttatcataaacaacacttaaactatctttatcataaagcttccctatacataccttataacctttttgttaagcttgtttacttcctcctagctagctcttctacacgtgatttttctaagatggtggggtcttttctatttgatttaagctttgaaaagaagaggatgaaagtgatgtgagaaagagatgttcacatgaagtatgtagaagggtggagtcttgaatgcgacttccacttaaggctcccctcttccctttatatagagtttaggaaataataaaatattcaaggacatttctaccctttctatctggttactctcatctagttccatcctaacttagtttcttctcattctattccatcctaactaaactcataattactcttttacttttatacaaaaatcttctaagtcatgatgacttgctttacaagtgtccctacacttgtctacttctttacaagtgtccttccacttggcattgtcatgaagcttcctttacaagtgtcccaccacttggcattgtcatgaatcttctccatttctctacctatttcacgtgaagcatcaagaaataagagaagattttcttctcttcatgtcatcttgtacatatgtctttcaaggttacgatggcttcttatcccttcatcaatggtgacttacaagtggctagatatttcttaagccttcatgattgtatcttatcattttaatttatgaatcttaaggtatttttctacttatcatgacttatcaaattaaaatatgacaaaccaccttattcccctttttcttctacttcttgtgaataccataatcaagggaaatatttttatcttctcttcttccttctatatcatgttattatttcctttaaagagtagaaaattgtgtggttctccttgtgtccatatgtcacctttcatgaagaagaagaattcattccaacatggcttcacacatggcattccttaagaggaagtaaagttcaatttgaactcttccacctaaaggataatattaaataatagaactctagagttttccagaaactgacttcaattacagtataaattgcttacaagtagtttatatagagtgctacacagaccttacattcaagactacttatatcttaattctgattagtccattccacttctgaccatcaaaattactaaatcatctctttgaataagtctatacatcctacaattaaaagaaaattccccagattctacttatcatttttctatactttcctgctacctaaattttcctgaatagaatttcaaagttatcaccgtataaaattcatagaaattctattctgaagctttctgtcacaaagtatttttgtaatttgccatcaaaggatactctgtaatttcaccaggttttcacaaagtatctaagggtgtcttggtaattttagcctcaagggtattatggtaatttgtcactctaggggcatgattgtaattttccaaaatatccaagggtatttttgtaattttcaccttaaaatatctaaccaaaatatctaggggcatttttgtaattttcacctcaagggcatttttgtaatttctgttttaagggaagggaatatggtcatttctcctcaaacatttttgtaatgtctctaattaatatttcacccaaataatttaaatatagaccatcaaatctctcataacctaatactcacatcaatagctatgcaagaataattcatataatattttgaccatagtttttgaaatttcagggtgttacatcatttcatttcaacatcatcatcataacaccaatatcatctcatttcaacattatcaaccacattaacattatctcatttaaacatcataaatcacatcatcattatatcattcaatcatcaccaacacatcaataacatctcattttcaatattattagccacatcaaggttaccacatttaaacatcacaaaccatataaacatcatctcatttcattcacaattcatattaccacgaaactggtattttaggaaaattctaaattaaagaggaggattacagtatagaaaacaaactctcatgcctattaaaattttagtaaaagaattaaatagagaacgaattataaaattttgggcagagtatcctctataattaagacttttcccaaaattcaatcatcacaacaacaacatcattcacagttttatccatcaacaagcaaattcatcgcatcccattagttaaaaacatcatttgccttgaaaacgagcacacacaggaacaaaaacacatcactcataaatacatcgcatcccattagttaaaaacaatttttcttgaaaaccagtacacagcagggacgggcaattatcttcatagttggactccctgacccccaactatggtatcaaaactataaccaggtaataaactccccttacctatctatatccctctattagctccttgaaatgtcgttttgggatctctcaagttcacgtgctttggcccaaatgcggagctctatataccaaatcgaagacaatttaatatagattttcaaggtaagatcaatattaacatttggggacaaatacccattcaaattcaaaaaggggctaaaagggtgttttaggagtccacattaaaagacatcattttgaaattttgatcacaccaatgtgaccagggttcaacaaggatcatagaaatgaaatcagtttcataaaaaagagacttttacaacatctcattttcaaagggttttcaaaggaagcatagaaacagccaataacattacccgaatcacaagagacatcaagagagacttaaactagctagaagaagacaaaggaaactaagattacctcaaggaaaccaagaaagaaggattgggagattcgttctctacagaaacttcgagaagagtttcgaagattccgctccgattaaagggttcttctccgtgccggggtctcgtggcaagcaacggcggcccgtggttgtctccggtggctgtgggtggttgaggaggatggtggcggagcttggagctgtttggaggagcaagaacctccatttttgtgacttggaagcttaaaaacgtatttagcatcgcctccactctcccaagcgagcaaaaatgcctgcaaaacttgcctgggcgagctgacccaattctagaattttcttctttagtgaaaaattaatttctcacgttccagacattattttgacaatcctaaccgtttaaagttacatatatgggttaggaatccatttgtaaaatttgaagacgatccaacggttaactaatctagaatgggaattttactaaaataggttttgggtcaaattcgaaataacgtcatctcaacgcaactgaagcaaattcctcataacttgacatctacatcaaacaattgtgcatggataattcacataacatttcagctaatcctgattaataaaattgatcaaattatacaaggaatacatcacacatatatcttaagttatcgaaatttcaaggtgttacaagagcaaacaaagataacacaagctatcatcacttcttatttcttttctttttctaccaagttatcaatgtttcttatagcaacctcccaatcaaccaacttatagaatttacaacactctgtacaatttagaacatatttcatttaatttttttcacaaggaatttgtttcctttttctttttctttcttttttctttcttttcttttctatagctttagccatatttaaaacaaagtatttttcatcactttagccatccaaatgatagaaatttccaacaaaatccctttttctctcctaacctaaggtaaggtaggaaattcttaacctaggttagtgttctaacaaaatcataagtgttttggctcaaaaagggctagcaaatggtaaatcattgtatattgggatagctttttggccagtggcttaaaatgtacaagaaagaaataaggcctaaatcatacccatgaatcatatgttatgacaattagaaattcatgcaaaatttactatataacatatcagtgaggacactcaatgcaatttatgtgggtacacacaatcactaagctttaaggcatgttttccatgttcaaatcaaatcagtgtttttgaaagctgttctttatcaactccatgtaaaaacatctaccttcatttggtatttggaaaaatcattccttgtttttcattctcaaagttgtaaaaacaattttgttgtgttctgatataattcaaaagcaagtttcaaaaacattatctgtttattctttccaaaacatgttatgtccaagaaatattttctcttttaagtcctaaaaagatttatacatattctacaaatatattaataaaacaaaatttaataaaaatgtgtacttccaaaaagagggaacctctgtgtacacaatcaaagtgtggaataccaaaaagaatcataaacgtgtgcaattatctaagcaaaaagtaaataaggaaataaagtactaaatttaatacaaagtagtaaagaaacataaagactatgtcacagatttttgaagatcatggttgaggatcttagcctcctccattgagataatcaacagaatctaccatgtcctcatccacatctgctctaaaatataggcctatccttgggccctgcaatggtagctctaacaaagcagatgatatattaaaaaaaaaacataagacataaaattcaaaagtaaagtttagagatataatttaaaaaacatatgagataaaatgaaaataacacaaattaaaataaagcttagaaacactgggttgcctgtaacgacctgcctcgttgctacgatatcactaactctagatcgtgcaatttcaattttaatatgaaaactccattaatttgattatgaaaatagtagtaaatttttttgcaataataccattattatacacacgatacaattacataattgaatacacatgtatgcatatattgaacccgtacatattatttacacatcaaaacttaatttgattttacatatatttacacctggaatcttacatgaccaaaaaaaagaatcgaagaactaactaagaaagagttgattaacaaaacacaactctttcccaaaaagaatttcaatgtcatcacgtcggcttggcggctccaacaaaaagaatctccctccaaggtcacctactgctgctcatctgctcccacgaacgaaagttcgcgatcatcacaggtaccaaccacacggtacaacaaatgcaagggtgagtttattatataaaaccaacaaacatcagatagcagcaattgggaaggaaacaacattacccacaacaatccttaacaaaaatccatgattccgatacacacttaacaaaccaatcatccaatgcatttcataactcaaacaatcatgcatagaatgatgcatgcacctgactcatctatcagcatgcaatgtggcaccatatcctgaaaatagcctctcataggaaaatgatgtagtggttcgtcaaggtcactctttcatgcataggccaccccccatggtgatcagtcctgagtcacaagggagttccaaatagagatgcccccctagtacctctgtaccctactgccaccatcctatttccatcaatgcatgggcatcatcaatatgggcatcatcaatgtatgacccggctaggaacacatccttcctcgcaagggtaacccgtcatacaccccctatgtatatacataacaccccaatatgggctcaccgatgcactgaccgtggctaggaacacatccttcctcgcaaggtaaccaactggtcactgcatcccacgtgtacatacacagcatacaaccatgggcaccatcaatgtatgacctggctaggaacacatcctacctcgcaagggtaaccagtcatacacccgccatgggtttccatgtatattcacatcacacaatgacaaccatgggaaccatcaatgcatgacctggcaaggaacacatccttcctcgcaagggtaaccagtcatgcacccccatgggtgtcaatatatatccatatcacataatgatattattagcatcaacataatctcttatcaatgtcattatcaatatccacatcacatcatctaattcatcatcatacatatcaaagtcatctcatttcaacatcatcaactacatcaacattatttcatttgtacatcatcattatctcattcaatcatcaccaacacatcaataacatctcatttcaacattatcaatgacatcaatatcatctcattcatccaaaatccatattaccacgagactggtattttaggaaaattctaaattaaagaggaggactacaatatagaaaatacactcttatgcccatttaaaaatttaataaagaattaaataggaaaacatattataaatttttgggcagaatctcctctgtaattaagacttttcccaaaaattcaatcatcacaataattatatcattcacagttttatccatcaacaagccaattcatcgcatcccattagttaaaaacacagtttttcttgaaaacgagcacacaggaacaaacacatatcaatcataaatacatcgcatcccattagttaaaaacatagtttttcttgaaaaccagcacacagcagggacatgcagttatcttcatagttggactccctgtccctcaactatggtatctaaactattaccaacataataaactccccttacctaaccaggaattctccctattacagcttagtggagttgtttcacgatccttcaaaatgcgtgcttgtccgaacacagagttctacataccaaattgaagacaatttagtatagattctaaagtaaagatcaaagttaacagttggattcaaaaacccattcaaatcaaaaaggggttaaacggtgtttttgggagttcacatcaaaagacataagtttgaaatttcgatcagaccaaggtggcccgggttcaacaaggatcactgaaatgacataaatttcataaaaaggagacttttacatctcattttcaaaggattttcaaagggaagtatagaaacaaccaacaacggtacccaaatcacaagagatatcaagagaggcttaaactagctagaagaagacaaaggaaactaagattacctcaaagaaaccaagaaaggaggattggaggctccattctctactgaaacttcgagaagattttcaaagatttcactccgattaagtggttcttctccgtgtcagggtctcgtggcaagcaacggcggcccgtggtggttgatggtggttgtgggtggtggagaagggtggtgggggagcttgggagctattttgggggggggggggggaaaaannnnnnnnnnnnnnnnnnnnnnnnnnnnnnnnnnnnnnnnnnnnnnnnnnnnnnnnnnnnnnnnnnnnnnnnnnnnnnnnnnnnnnnnnnnnnnnnnnnnnnnnnnnnnnnnnnnnnnnnnnnnnnnnnnnnnnnnnnnnnnnnnnnnnnnnnnnnnnnnnnnnnnnnnnnnnnnnnnnnnnnnnnnnnnnnnnnnnnnnnnnnnnnnnnnnnnnnnnnnnnnnnnnnnnnnnnnnnnnnnnnnnnnnnnnnnnnnnnnnnnnnnnnnnnnnnnnnnnnnnnnnnnnnnnnnnnnnnnnnnnnnnnnnnnnnnnnnnnnnnnnnnnnnnnnnnnnnnnnnnnnnnnnnnnnnnnnnnnnnnnnnnnnnnnnnnnnnnnnnnnnnnnnnnnnnnnnnnnnnnnnnnnnnnnnnnnnnnnnnnnnnnnnnnnnnnnnnnnnnnnnnnnnnnnnnnnnnnnnnnnnnnnnnnnnnnnnnnnnnnnnnnnnnnnnnnnnnnnnnnnnnnnnnnnnnnnnnnnnnnnnnnnnnnnnnnnnnnnnnnnnnnnnnnnnnnnnnnnnnnnnnnnnnnnnnnnnnnnnnnnnnnnnnnnnnnnnnnnnnnnnnnnnnnnnnnnnnnnnnnnnnnnnnnnnnnnnnnnnnnnnnnnnnnnnnnnnnnnnnnnnnnnnnnnnnnnnnnnnnnnnnnnnnnnnnnnnnnnnnnnnnnnnnnnnnnnnnnnnnnnnnnnnnnnnnnnnnnnnnnnnnnnnnnnnnnnnnnnnnnnnnnnnnnnnnnnnnnnnnnnnnnnnnnnnnnnnnnnnnnnnnnnnnnnnnnnnnnnnnnnnnnnnnnnnnnnnnnnnnnnnnnnnnnnnnnnnnnnnnnnnnnnnnnnnnnnnnnnnnnnnnnnnnnnnnnnnnnctccgtgtcagggtctcgtggcaagcaacggcggcccgtggtggttgatggtggttgtgggtggtggagaagggtggtgggggagcttgggagctattttgggggggggggggagaaaaacctccattttttgagttttgacgttgctggtactatttatcaccacctccactcgcccaggcgagcaaaaatgcctgcaaaactcgcctgggcgagctgacccaattctagaattttctacttcagtgaaaaattaatttctcatgtgccagacattatttggacaatctcaacggtcaaaagttacatatatgggttagaaacctatctttaaaatgtgaaggcgatccaacggttaagcaatccagaataatgattttactaaaataagttttcaggtcaaacttagaatcacacgattcaacacagctcaaacaaactccacataacttgacctctacaccaagcaattgcacatgcataattcacataacatttcatctaatcctacttaataaaattaatcaaattatacaaggaatacatcatacatatattttaagatatcaaaatttcagggtgttacattgcctcccaggagcgcttctttaatgtctttgtggccgggcgcctttgatatggcttaggctttcagcaattggaaaatagtggtgagccaatggtgtctatgttttccttcaaaattttcaccagtttcttttcttcttaagaaaaactttaattactgaaaactggtttctttgaatcacctgcaagaaaaacacttttaaaatgtaaaggtactgcgtttaccttcattattgattcttgattcttcttttcctctgacaattttttaaagagagattggttgtaaggaatttctttgaaagcatctagttgttggagacaatatgaactctcattttcttcatattcactcatctcctcaaatgcttcagtcaatgttttctctgaacaatcttttttttgaattaacctcttggagtgataagtgccatattttagctactttagagattataatgttggcacttatctttttattttagtaaaattgttgattaatttgccctaaaccaagttgttttatattttgtgcaaatatgtagggtgttattcacattttggaagattcatccactcaatctcggtgttttgataagtttcaatggtatccagagcatctaaacaagcaagacaagtacaaaggggaaaaaatgtcaaattaggaagattttagaagcgaattcagctagaactcgcctgggctaatgacctttcttcaccattaagagttaactcgtccaggcgagcattttatgtgtaattcagtcgcctgggcgagtggctttcttcaggactaagagttaacatacccaggtgagtaaaaacaggccaaatcactcacctgggctagtagacacgagcaggttgccatttcctataaacagccatgcaaatgaaggattaagacatgtttttttgggagaagaacataagaaacacttaggagatttagagagaggtgagacaagagagaaaaggagtggaaattctgcaagaatgggccagggatcgctaccttcgtcatgttttttgctgatctcttgctctgcaccatgatcggttagtttctcctatggcttgggtgtaatctttgtacccttatgtatctcttttgatatttgatatatgtatgaatcttttctactcattctggtaatttcattctattcttaatgcttgattctacttgattactagtttcatgaaaatggattctaagcttaactggaaagtgccattagaatttgaactgaatgattttactctttacattatgtttctaggaatagagcataacgtttagatttcaaatagcacatgattatgattataatgctgggttatttattgcatatgcgaggaatcgatattcggtaaatatccttaggattctcgaatgcgagggtcgattcaggatgaattaatgtgtgcatcagtaatgatagaaaacgatttatacatggtaatgttaaatggatacaaatggtatgaatgatgaaacccaatcttaggttctcttcatttaaatttcactttattagtttacattaattttcgttatttcagttatttccttaaaaccatcaaacttcgatcatactcattgtacataactattgaactgttaaattttatttggattagttgagtagctcatgtccctgtggagatgatcttttataaattctataacctgcaatgacaatgggtacgcttgccaagagtctatcatggagtccgaatttacttcatccaagacatccactctaaaacactcccttggttcctttgggttaacctgtatgtttgttgaaaaaggtccatttctatgcttagacagttattttgcaagctgtccaacctgaatttcaagatttttaatggaatcagaatgttgttgttgtggtggacatacatttgaagaacctgcataagagttgttagagggacctgcaaaagaagagttagttggaccataatatgcattatcattttgctgcctccagccataaggctgatttgaacttggaccacctctatagccttggtaattttcttggaagttctgttgaggtgtagtctaattctgtaaataatgagccttttcttcttgttggcattcaccaggtgctaaacaatggccatgctgatggtcaccaccacaaaagtgacatcttagaactttttgaacttgatgagcttggtgtgttctctgtgatccaccttgctgaaattgttgaggaagtttgccaatctgttttgttaaggcctctatgtgttgagtcaaaagtttattctgagctagaattgcattttgagtatctagctccattatatcttttctttgaatcgaagatctatcatggtgagactgatagtcactggttgctatggagtcaatgattacaattgcttcctccgggctctttgacatcatagtacctccagctgaggcatcaagaatcatctttgtctgaggtctcaaaccactatagaaaatatgtagttgtgcaacatcatcaatgttatggtttgggcacctccgtagtaaggatttgaatctctctcatgtctcacagagaggttcatctgctccttcagaaaaagtagcaatggttgattttgcactaatgaatctggatggaggaaagaatctagcaatgaatttttcctccacttcttcccaagtgctgagacttttatttggttgggattggagccatatctttgccttacctgtcaaggagaatggaaaagctctgagatagacagcttcagcatcttttatcaaaaactcccatggtactgcacaactccatgaaggtagacaaatgagtgtatggatcttcatggtccatcccaacaaaaggatgtgagccaatcaaactgagcaatgctggtttcaattccacaactttgttactaaaaggagggatgactatgctattataatgttttggtccttgatggtaagcatagtcaccaagagttctccttggcggtctatttccttctcctcctctacccgccatattatcacttacaagtggcttttctggtgtaggagaatcaatagaagaagtttcacccggtggcttatgggtttcttgtttctttttttctttatgtttttcctttctgtcttggtaatttcttgatcaaataaagatttatatgcagagaacatgttgaattcagggggagctgcttgaagcataagcaaaggttgattcaagtttcaagttttagctttcaacatgccttgaaggattgaagaacaacttgtgattaaatgtaaaaggaagaagcatttctggtgatccaagtgcattgcattcacatcattcattaattcaattagtttaagaaatagaattcacaaggcattgataaattgtttaaggttttgaattaaatcaagagtttttggaaatataatgttttctactggtttaatcgattacattaagataagaatcgattatttttgttcatagtgctttctggaaaacttttcaagaacaatgtaatcaattacgtatcggtttaatcgattatcttacattggttcacatataaactgcttgataaacattttaatcgattaccaacaggctgtaatcgattacataggctatacagaaaatatcaccttcctgtcttaatcgattaccaagattagtaatcgattacattttatgtctgtgcttaacatgtttgctgcattaaccgattaccaattatagtaatcgattacataattcaaaatagtttatgcagtttcctggtttaacgattaccagagttcataatcgattatacagtgtatgtgcattcgtggaactgtctgttttaatcgattacaagtcggaataatcgattattttgttcgttgctcatatccagaagtttgttgaacagtttaatcgattacaggagcgtatgtaatcgattactgacggttagaaagtctgttataaatagaacccttgctcagctgttttaggaacttgatcaattcgtattctgagcatactaaggctttctaaacacctttttagtgattttctgagttcattgagttcttgctttcactaaaacacttatgggttgttaagtgattcttgaagcaagaagattcttttcaaatcataaggaaggtgatgttctgagattgttttcattattcaacctgattactcattcatctgcatatcattcactggatcatcaggtgatttctttccgtaactttgtagttgtaattcgttttgattttggatgtatttttgtctattgtaattgggtttcttgcttgtaatctagagatagagtttctcttggggtgtgctgagtagtgttcttagtgggttgtctctaagaatctaatagtgttttagatttctgaactttatctagggttgataaagggagactttgtaattacttgtaagaacagaaatttgcaatagtggaactccattctagtgttgagtggaagaaaactggatgtagcttcatagtgtttgaagtgaaccagtataaatcttgtgtgctctattattaatttctttcttgattattttctgtccatcttgattattttgctttgattatcaattcaattttgagttggtggataccttggactgaacatttgattgaataaagtttcttggtttcaaaagtgataaagatccttagggaaaactctgattttgttctataaatttttttaatttaccaagactaaccaattcacccccctcttggttaagtgtgaagtgttcctatattttacaattggcatcaagagctaggtcttgaaagttactcaagatcactttctttcaaaaatgaatacttcacaaataaccttcaaggaaggtgcctccttaaatagacctcctttatttgaaggggagcatttcaatttttggaaaaatagaatgaagatctttattcaatccaatgatccgggtgcatggaatgcaattgaaaaaggtcctagggtaccaatcaaagttgttgataataacatgattcccaaagattgggatgagatgaatgatgaagaaaagaggattgttcagtatgattttaaagccaagaatatgataacttctgctctttcttctaatgaattctttagaacagttagatgtaccaatgccaaagaaatgtgggagatgctagaaatcaccgatgaagggagtgaagaggtgaggagatcaagaaagcactcattaatacatgaatatgagatgttcaagatgagtcaaaatgaaagcatctctcaattccaaacaagattcacacacatagtgaatcatctcttgggacttgggaagaactttgatgttgaggaattgaacatcaaaatcttgaagtgcctcactagagcatggcaaccaaaagtgacagctatcaaagaatctaaagatctctcacaaatgaccatggctgctctttttggtaagttacttgagtatgaattagaattatctcaactaacctttggtgaagatgcagaaagaaaaggcaaagaaattgcactaaaggctgcaacacctaaggtggaaaaagaggaaaactcaagtgatgaggaagatgaagaaagcatgaacttgattgtgaaaaagttcagcaagtttctaaagaagaataagggcaaaagatttacaagaaataacaagagcaacaccaacaacaacactagcaacaccaagaagattgaaacaatttcacatgctttgaatgtggcaaacctggccacataaaatcagaatgttcaatctacttgaagaaacaacaaagtgacagcaaaggcaaaagagaagcaaagccaagaagagcctacattgcttggggggacaatgaatcttcaactttctaatcctccactgaattagaagaagccaacatgtgccttacttcaattgtcaatgaagagaatgatgatctcttagaagaagaagataaggtaacctctgaacttgatcaagctatttttgcttttcaagtgatgcataaagaggctaaaaagcttgctaaatccaacaataagcttaagaaaaacattgaggatcatcttgcaaaaataatggaattacaaactgaagtttgtaacttgaaggaagaaaatgagaaacttacttcaagctacaaatcaagtggttgtgtttgtgcctcttcctctacaactagtgacaaatatgaaatgctgcaaaaagtttttgatgagtatagatttaatcaagaagaaaaatatatgcagattgtttcaaagaacaatgagttgattgatatcttggaaaaactcaacaaaggaaaatgtgatttgaatgatatgttgagtgctcaaaaacagtttggtaacacttctagtttggggtacaaaaagagttttaaaagtgttcaaaagacaacatttatacctccaaaacagaagaaaaagaagaaaccaagattcaatcaaaataggttctttagaaattcatataaagctgtggtttgtcactattgtatggagaaaggtcatacatcctaccaatgttttgcaagaagattttatgtcccaaatggtgagtgtatttgggtagaaaagaaaaagcaagcaaataacccctttggacccaaactcaaatgggtaccttctcctatgaagtgatttgttctttttgtaggtatgtcttagaacaagctcttccttaaggtatcttgatagtggctgctcaagacatatgaccggtgacaagtccttgctcaaaaatcttacacttaaagatgggggctatgttacttatggagacaacaacaaagggaagttataggtgaaggaagcattggtgatagcttaaaaacaaaaatcagtaattactctatgttgaaggcttgaagcataatctacaaagtataagccaattatgtgataaaggctataaaatttccttcaatcaagattgctgcataatatgtgatggtacgagtggagaagtaatccacattggcaaaaggaaaggtaacatttatttgctttcaatagaccatgcattattccataagactacatgcttaatgagtaagttagatgaaacatggctgtggcataggagagctagccacattaacatgcaccatatgaataaactcattaaaaaggacttagttactagcctaccaaaactcaaatttgaaaaggacaaactatgtgatgcatgtcaaaaggggaaacaaaccaaaatctcttttcaaagtaaaaacattgtttccacctcaagaccacttgaactactgcacattgatttgtttggtccttctagaaccatgagtttaggtggtaattactatggacttgttattgttgattactactctagatttacttggattttgtttttgaaatccaagagtgatgctttccattctttcagaaaattagccaaacttgttcaaaatgaaaaagggtgtaaaattatctcaattagaagtgatcatggtggagaattctaaaatgaacattttgaaaaattctgtgaggaaaatggaattaattgcaacttttcagctccaagaacaccttaacaaaatggtgttgtggagagaaaaaacagatcacttgaagaaggtgcaagaacacttctaaatgagacaaatttaccaaagtatttttgggctgatgcagtaagtattttttgttacactttaaatagattactcataagacccatcttgaagaaaacaccttatgagttatacaaaggaagaaagcccaatatttctcatttaagaacttttggctgcaagtgttttgttttaaataatgggaaagaatcactaggaaagtttgatgcaaaggctgatgaagccatatttcttggatattcattgcaaagtaaagcatatagagttttcaacaaaagaaccatgtgcatggaagaatctgtccatgtaatttgtgatgaatctaacccctcaaaagaagaaaaagattgtgatgtagatgcaagtcaaatggaagaaaatgtccagctagagaaattatctatcaatgagaaaggtgaatctagtactgaagcaattccatcaatttccaatcaagagcaaaaaaagtggagaactacaagagacctttcactagacaatattattggagaaatttcaaagggagtctctactagatcttctcttagaaatttatgttgtgatatggcttttgtatctcaaattgaacctaaagatattaaccatgccttacaagatgaacattggatgcatggcatgcatgatgaactgaatcaattcaaaagaaatgaagtttgggaacttgttcattaagaggcataaggatgatatcctattggttcaaatctatgttgatgacattatttttggttcaactaatcaaatgctttgtaaagaattttctgcagctatgcaaaatgagtttgagatgtctatgatgggagagttaacattctttctaggactttaagttaaacaaatgaagaatggaactttcctcaatcaatcaaagtattgccttgaagtcatcaagaagtttgagatggagaaaagcaaagatgctgcaactcctatggcaacttcaacataccttgattcagatgaaaaagggaagaaggtggatgaatccaaatatagaggaatgattggctctttactatatttgacagctagtagaccagatattatgctaagtgtttgcttgtgtgcaagataccaagcaaatccaaaagtgtctcaccttacagcagtcaaaaggatcatcaaatacctcaaggcaacacccaaagttgggctatggtatcctaaaggtgcaccaataaatattattgatattctgattctgatttggcaggatgcaaacttgataggaaaagcacaagtggaacttgtcatctccttggaagctcactcatatcatggctttacaagaaacaagcttgtgtggccatgtcaactgctgaggctgaatatatctcagctgggagttgttgtgcagaaagcctatggcttaagcaacaaatgcaagattatggagttgatcttaaggagataccactactttgtgacaacacaagtgcaataaacatttcaaagaatcctatcatgcactcaaggaccaagcacattgaaattagacatcatttcataagagatcatgtgcagaaaggtaacatcaaggttgagttcattgatacccataatcaactagctgacatattcactaaacctttgccaaaggatagattttatacacttagaaacatgctaggcattcttgatgaaagtaatatatgctagcttgtttaatgtatgcttttccatgactaattgaagcctcactactgcatttatcattgaatgatgaaaaattcgtattgatctacaaaaatgctctgtttctgataaatttgctctaataatcaattacaccacgggttaatcgattaaaatcatcaaaaatcacattatgtgtgcaagttgtgcatcagtaatcaattacgttgagcttgtaatcgattattcttcatgtttcagaaattatcttctcctgaaataattgattacacaacgggatagtcaattactttgattaaaactcattttatatttatgtgtccctctggaataatcgattacaacatattggtaatcaattacctatgtgtcttgtattacatatttcctgaaataatcgattactacaaaattataattgattacacataaacttagaaattttgatcttcctggaataatcgattaccactcgggataatcgattaaataagctttgatacttgtatggatttcatcttgactaatataatcgattactatggtatataatcgattacaacttatcttcaacctctagaaacctcccaaataatcgattaccttacgggataatcgattacagtgtgttaacttagttttcagattgtctgaaataattgattacctttaattttaatcaattatttaagctgttatttgaattctgacagttttttctgggtttgataactgcccaatccaatctatttcgtatcgaatcatcattaattggtgttaactgtctctaacagctagatttttgaataatctgaacgttggtgagtgattcttgtctataaatagtggctttgcatcaatccatgtccttgcactaacatctctatcttctcttgctttctttgtgtccaagccttctgtgtctggtaaattcctgtttgtgtccttaatccatgataaaaatgtctacaccaaaacgtgctaggactagtaaatgtaaggtaggagaatcatcttccaacccacaacctcaaccccctaataggttggacatttggttcaacaaagaatcagacaaaatgaactacctccagttcaatgccacaaagcacattagttcttctaagtaccttagccttgattggttcaccaaggaaggattcacatttcctacactcttagaaaaccaaggccttagaaggtttgttgaaatgaagggtacctactaccctgacttggttaaggttttctatacccgtgccaaggcatccatgaatgggtaccttaagtctactgtcaagggagttgagatgataatctctcctgaattgtgggagaccattgctggtgtagagtgtcatggggagagaaagtttgaagagacccctaatggttacaataagataggcatttatagggaaatgcttactgatccaaacatacccattaggaatagattgagtactggtccaatgcaccagaaaataggctacttcaccatcttatcacctatgtcttgactccaagggcaacaaatcatgcccaagccactgatgaagacctacaattaatgtatggtctaacaaactctattccatgaattgggtcattatcttccaagagataatgttaaaattaaaaaggcttgtcaactatccctttccatatcctattcttatcttcagagtcattgataacttccagattgatgtttcaaatgaggtggtggacaacaccaactcctcaaacagcctcatccaagagaaacacttgtcaaagcatggattgatgaagacacctgatggatgggtgatggctgggcatcaacagcaagtgcctccacaaatggcataacctgatcctgctgatgttgctgacattggaggccagcaagtgcctgattctgaggaagaagaagaggattctcaacagcctcttcatactaaatttgaatccctaatgctagctaagatggatggggtgcttcaaatgcatcatgatttcagggctgaaactcaaggatcatttagggaaatcaatgaaaggctagataacatagaagcccatcttagaatggatgattctgaagacttttaagtcttatttttattttgtttatgtactctgttatttttatgatttttagtcttcttatgtaatcttccctccaatattattggaatagtatgtttctacttctttatatccactgtgccttgcaatttttgacattaaaaagccaaatagggggagaaaaattgatttaagcaatgccctgcatacctatgtttgcccctgtttttgtgcgtgttttttagctaaaaattggtctgaatggtttgtgaaatttagggggagataactgttaaaaatgattgcattaagtaaatatatcatgtgaatgaatgctaagttaatctcatatgcgtttaacacttgttcttgcaaaggcattgaatttttcaggtctgaaaaagcttagatagaatgctatggtggttcctcaaattaatctcaagacccactgctaatcaattaaaaacttggcatgtttaaagccaaaaagggggagattgttgaattcagggggagctgcttgaagcataagcaaaggttgattcaactttcaagttttagctttcaacatgccttgaaggattgaagaacaacttgtgattaaatgtaaaaggaagaagcatttctggtgatccaagtgcattgcattcacatcattcattaagtcaattagtttaagaaatagaattcacaaggcattgataaattgtttaaggttttgaattaaatcaagagtttttggaaatataatgttttctactggtttaatcgattacttatcgatttaatcgattattttacattggttcacatataaactgtcttgatgaacattttaatcgattaccaataggttgtaatcgattacataggctatacagaaaatatcaccttcctgtcttaatcgattaccaaggttagtaatctattacattttatgtctgtgcttaacatgtttgctgcattaatcgattaccaattatagtaatcgattacatagttcaaaacagtttatgcagtttcctggtttaacgattaccagagttcgtaatcgattacacagtgtatgtgcttttgtggaactgtctgttttaatcgattacaagtcggaataatcgattattttgttcgttgctcatatccagaagtttgttgaacagtttaattgattacaggagcgtatgtaattgattacataagcaaaataatcaattacaggagcatatatatcgattactgatggttagaaagtctgttataaatagaacccttgctcagctgttttaggaacttgatcaattcgtattctgagcatactaaggctttctaaacacctttttagtgattttctgggttcattgagttcttgctttcactaaaacacttatgggttgttaagtgattcttgaagcaagaagattcttttcaaagcataaggaaggtgatgttatgagattgttttcattattcaacctgattactcattcatctgcatatcattcactggatcatcaggtgatttctttccttaactttgtggttgtaattcgttttgattttggatgtatttttgtctattgtaattgggtttcttgcttgtaatctagagatagagtttctctaggggtgtgctgagtagtgttctcagtgggttgtctctaagaatctaatagtgttttagatttctgaactttatctagggttgataaagggagactttgtaattacttgtaagaaaagaaatttgcaatagtggaactccattctagtgttgagtggaagaaaactggatgtagcttcatagtgtttgaagtgaaccagtatgaatcttgtgtgctctattattaatttctttcgtgattattttttgtccatcttgattattttgctttgattatcaattcaattttgagttggtggataccttggactgaacatttgattgaataaagtttcttggtttcaaaagtgataaagatccttagggaaaactctgattttgttctagaaaatttttaatttaccaagactaaccaattcatcccccctcttggttaagtgtgaagtgttcctatattttacagaacttacctctcataaaagaaaaagaacaactacaataacccgtaagtaccgaggttagtgaaaataaaatatgacaaaagagaatttatacaaaatcaaaataaataacgaaaataagaaaaaagtcctattcaactaaaaattaaatctgaaagaactgagtgagtgactcaagtccccaacaacggcgccaaaaacttgttagactattggcaagcataccaatgtcgtcacaggttacaaaatttataagagattatctccatagggacttgagctactcatttctcccaaataaaagtaataagttcaacagttatgtacaacaaatattatcgaaatttcatggttttacagatataacggatttagtgcgtcgaaaatacggaaaattatgaaaactagtaaaatgaatttaattaatttaagagaacgtaggattgagtttcatcgttcataccctcagtatccatgtaatattaacacatatgaatcattttctaacattactgatgcacacattaattcaccccgaatcgatccctcgcattcaagaatcctaaggatatttatcgaatatcagtccttcgcatatgaagtaaataacctagcattacaatcataatcttgtgctatttgcaatcaaaatgttttgctctattcctagcaacgcaatgtaaatagtaaaatcattcagctcaaatcctaagggcactttctagtcaagctcaaaatccaatttcatgaaactagtgatctagtagaatcaagcattaagaatagaacgaaattaccaataataagtagaaaatattcatacatatgtcaaatatcaaaagagatatataagggtacgaagattatatctaatcctttggagcaaaacccaagaccagctcttggtaatctcaacgattcttaaaagctagggccaaccttcgatagtacagtaggtgggcctccagcaaaacccaggaccaactactggtaatttcaaaggttcttaaaatccagggccagccttcggtagcacccttagtgaacctctagcaaaaccaaggactaactcttggtaatttcctaaggttcttaaaacctagggccagccttcagtagcaccctcagtgaacctcctgcaaaatctaggacggacgtgtccctgatcggtctccaatggttggcaaatcccaaggtcaacccttggattcagggggagctacttaaagaatgcaaaggaattgtgattcaagctttggttttgagctttcgacatgcaatggatgccttgaagattaattagtgtgaaatgtgtaagagaaaagcaattctggtgatccaagtacattgcattcatattaatccataattcaatcaattgggttcataaaaatcacaaggctttagttatttgattaagtttttgatttgatttaaaggttttggaaaaatacatttcctactggtttaatcggttaccttaatgacttaatcgattattttgttcttagtctattctggaaaatctttcaagaacaatgtaattgattacctatcggaataattgattatttgacctttgtttttatataaactgccttgttgaacactttagtcgattattaatgggtagtactcgattacatagccacatatgattttaagtcatgctggaataatcgattaccaaagtatagtaatcgattacacaggctttattggaaaagctatcttcttgctttaatcgattaccatatttcgtaatcgattacactatatgttaatgcttacaagacttgctggtctaatcgattaccacatatagtagtcgattacatagttcattctgtttttaaagactcctgtcttaatcgattaccaaagttagtaattgattacatagtgcattttgatattttgaagcttcctgtcttaatcgattacaagacggaataatcgattattttgctcgttgctcatatccagaattgataaagggagacattgtaattgattgtaagaattgaaaattataatagtggaactctaacctagtgttggttggaaggaaactggatgtagcttctagtgttgaagtgaaccagtataaatttgtttgtgttttgattctctttcccttaactcttatattgattgtgttcttgtttaaattgcttgaccaaagtcagttttgatccattgaattccttagggctgagctacttgattgaatatggtttcttggtttttcaaaagtgataaagatcctaggaactctgattttgattaaagaaattttaatttaccaaggtttaaccaattcaccccctcttggttaagtgtgagatattcatattctttacaattggcatcaagagctggttcttgaaagttactcaagatcacaattttttttttcaaaaatgaatacctcacaaataactttcaaggaaggtgcttctttaaacagacctcctttgtttgaaggggagcatttcagtttttggaaaaataggatgaagatctttattcaatcaaatgacccaggtgcttggaatgcaatagagaaaggtcttgtggtggccatcaaaactgttggtaatgacatgattcccaaagaatgggatgagatgactgatgctgagaaaaaggttgttcaatatgattttaaggccaaaaacatgataacctctgcactttcctctgatgaattctttagaacagttaggtgcacaagtactaaggagatgtgagagatgttagagatcactcatgaaggaactaaagaagtaagaagatcaaggaggcattcattgattcatgagtatgaaatgttcaagatgaacacaaatgaaagcatttcccagctccaaacaagattcacacatattgtcaatcatcttttgggacttggaaagacttttgatgttgaggaactaaacatcaagatcttgaagtgtctcactagatcttggcaaccaaaggtgacaacaatcaaagaatccaaggatttatccaaaatgtcaatggctgcactctttggtaagttacttgaatatgaattggaattatctaaattaacttgtgttgaagatgcagataagaaaggcaaaggaattgctctaaaagctgcaacttctaaagaggagaaagaagaatcaagtgataaggaagatgaagagaacatgaacttgatagtgaaaaagttcagcaaattcatgaagaaaagtaagggcaaaaaattctcaagaaacaccaagaacaacaacatcaacaacaacaacaacaagaagattgatagcaactttacatgctttgaatgtgggaaacctggccacatcaagtctgaatgctcaatctacttgaagaagcaacaaggggacagcaaagggaagaaagaaggaaagtctagaagagcttatatagctttggaagacaaagactcaacaagttcagaatcctccactgaaatagaggaagcaaacatgtttcttacatccattgtcaatgaagatgatgatgatctcttgagtgaagaggatgagataaattctgaacttgatcaagctattcttgcttttcaagaaatgcacaaagaggcacaaaagctttcaaagtctaacaataagcttagaaagaatattgaagatcatcttgctaagattattaaactacaagctgagatttgtaacttgaaggaagaaaatgaaaaacttgtttcaagctacaaatcaaatggttgtgtatgtgtttcttcttctacaaatgttgacaaatatgatatgttgcaaaaggtctttgatgagtatagaatcaatcaagaagagaaatataagcagctcctttcaaagaataacaatttgattgatctcttacaaaaattgtacaaaggacaatgtgatttcaatgaaatgcttagtgtacaaaaatatgctggagatacttctggatttgggtataaaccaaactcaaaatctgtccaaaagacaacatttgtgcccccaaaatacaagaataaaaggaagtcaaggattaatcaaaatgctttctttagaaagtctccaagggcttttatttgcaactattgtatggaaagaggacacacatcctataaatgctttgaaagaagattctatgtgccaaatggagagtgcatttgtgtggaaaagggaaagcaagtcactaacccctatggacccaacctcaattaggtaccttcttttatgaattaatttgatttttcaggtatgtctaagagcaagaacttccttgtggtatgatagtggatgctctagacatatgacgggtgacaagtctttgctcacaaatcttgttcctaaagatggaggctttgtcacttatggagataacaacaagggtaagatcattggtgaaggcaacattggaaatagcttcaataccaagattagcaatgttctctatgtggatggtttgaagcacaatcttctaagcataagccaactatgtcacaaaggtttcaagatctcattcaatgagaattgttgtataatatgtgatggccatatgtgatggccataatggtgtagttcatataagcaaaaggaaaggtaatatctatcaactttctattgaccatgcattctttcacaaaacttcatgcttaatgagtaagttagatgaatcttggttatgacgtaggagagctagccacatcaacatgcaccatatgaataagcttattaaaaaggacttagtaattgatttgccaaaactcaaatttgaaaggacaaactttgtgatgcatgtcaaaaggggaaaaaaactaaaatctcttttcaaagcaaaaatattttttccacctctagaccacttgaattactacacattgatttgtttggtccttctagaactatgtgtttgggtggcaattactatggacttataattgttgatgattactctagatatacttggactttgtttttgaaatccaaaagtgatgctttccatgcttttagaaaattagccaaagttgttcaaaatgagaaaagcaacaaaattatctcaataagaagtgatcatggtggggaattccaaaatgaataatttgaaaagttttgtgaagaaaatggaattaaccataatttttcagctccaagaacacctcagcaaaatggtgttgtggagaggaaaaatagatcccttgaagaaggtgcaagaacacttcttaatgagacaaatttgccaaaatatttttgggctgatgcggttagtacagtttgctatactttgaatagacttctcataaggcctattttgaagaaaaccccttatgagctgtacaaaggtagaaaaccaaacatctctcacttaagaacctttggctgcaagtgttttgtgttaaataatgggaaagaatcacttggaaagtttgatgcaaaggctgatgaagctatatttcttggatattcattacaaagtaaagcttatagagttttcaacaaaagaactatgtgcatggaagaatctgttcatgtaagttgtgatgaatttaacccttcaagagaggaaaagaaatgagaattagatgcaggtcctatggaggaaattgtccaacctattgaagaaaaaggagaaccaagtgctataacaaatccatcaacacctaatcaagagccaaaagaatggagaacaacaagagatctctcacttgacaacatcataggtaaagtgtcaaagggagtatcaactagatcttcattgagaaatttatgttgtgatatggcttttgtatctcaaattgaacctaaggatattaaccaatccttgcatgatgaacattggatgcatgctatgcatgatgaactaaatcaattcaagagaaatgaagtttgggaacttgttcatagaccatcatctttcaagcctattggtactaaatgggttcttagaaacaagcttgatgaaagtggaaacatagtaagatacaaggctagattggttgctaaaggttacaatcaagaggaaggcattgactatgaggaaacttatgctccagttgcaagattggaagctataaggctattgcttgcatttgcatgtttaatgggttttaaactttatcaaatggatgttaaaagtgcctttttaaatggatatattgaggaggacatttatgttgaacaccctcctggatttactgatttcaaatacccaaaacatgttttcaaacttaaaaaggccttctatggtctaaaacaagatcctagatcatggtatgaaaggttaagtaaatttctttttgaacaatctttcattaaaggcaatgttgataaaaccttgttcatcaagaggcataaggatgatattctattggttcaagtatatgttgatgatattatttttggttcaacaaatcaattgctttgtaaagaattttctgcagctgtgcaaaatgaatttgagatgtctatgatgggagagttgacattctttcttggacttcaagtgaaacaaatgaagaatggcactttccttaatcaatcaaaatatttccttgaagtcatcaaaaagtttgaaatggagaaaagcaaagatgctgcaactccaatggcaacatcaacctaccttgatttagatgaaaagggaaagaaagttgatgaatcaaaatttagaggaatgattggttctttattgtatttgacagctagtagaccagacattatgcttagtgtttgcttgtgtgcaagatatcaagcaaatccaaaagagtcccaccttacagcagtcaaaagaatcatcaagtatgtcaaggcaaccccaaaagttgggctatggtatcctaagggtgcacaaatcaatattattggatattctgattctgattttgcaggatgtaagttggataggaaaagcacaagtggcacttgtcatcttcttggaagttctctcatatctttgcattgcaagaaacaatcttgtgtggctttgtcaactgctgaagctgaatatatctcagctgggagttgctgtgcacaaagcttatggctgaaacaacaattgcaagattttggagttgaactaaaagagataactctgctgtgtgacaacataagtgccataaacatttcaaagaatcttgttatgcactcaaggaccaagcacattgaaattagacatcatttcctaagagaccatgtgcataaaggtaatatcaagattgattttgttgatacaaacaacaaattggctgatatattcacaaaacctttggctagagataggttttatgcacttagaaacatgctaggcattctcgatgaatctaacatatgctagcttgtttatttcatgtctccacatgctaaattgaaatccttgctgcctttatcactaaaattgctgaaaattcgtattgatctgcataattccctaaaatctgataaattttctgtaataatcgattacactacgggttaattgattaaattcattaaaatccacattgtttatgctatttgagcttcagtaatcgattacaacattaaaataatcgattattctttgtttttgaaaaacttattcttactggagtaatcgattacacgtcgggataatcaattacattgagtaaaatgcgttttccagtttcaaagtttcattggagtaatcgattaagtgaaattgtaatcaattacattgcagttatgtatatttcaaaattccaaatgctcttggaagaatcgattacaacaaaatggtaatcgattacatacgtgtttaaaattttaaactcttctggagtaatcgattatgagtcaggataatcgattacataagctctaatacctggctgattcacaaaatctctgctataatcaattacatgatcatataattgattacactttatcttcaacctctggatgcttgtgaaataatcgattaccatgtgttatttcaacgttctaattgtgcaaaataatcgattacaattagcatttaatcgattatttagtctgttggtgcatttgtgacagtttttctctagaaatgtaactgcccaaccaaatcaaattcgaatctttgatcactgcagtgccttaactcccaccaacagctatatttttgaaaaataggacgttaggagcctcaatttggtctataaatagaaccttgcatcattgaaaagccttgcaccatagtctcttcttcctcttgctataattctgagtttttccttgtgtctgtgtacccagaaacctctccaaaaatgtctacccctaagagagttagaacttccaaaaggaaggtaggggaatctttttctaatcctccccctcctcctccaaataggttagatatttcgttcaacaatgagtctgataaaatgaactatcttcagttcaatgccactaaacctatctgctcacccgaataccttgacctcaactggtttataagggaaggattccaattccctgcttatctagagacccaaggtcttaggagattcctagaaatgaagggtaccttttaccctgatttggtgaaggtattttatacctgtgccaagggctctatgagtggaaatatgagatccattgttaaaggggttcctatggaaatcaccccagatgtgtgggcatcagctgctggcctagtatgtgagggtgagagaaagtttgaggaagatcctgagggttacaacaaactagacacctatagggaaatgctacgtgacccccatatgcaaattaggaatagattgggtactggccccatgacccctgaggataggttattacactacattataacctatgtgctaacccttagggcaactaatcatgcccaagccactgatgaagacctacaactagtgtatggtctgaagaactccatccccatgaattgggttttaattcttgaggagattatgctaaaatctaaaaggctagttaattatccttttccctatcatgttctagtttctaggttcatagatcacttcaacattgatgtaactaatgaagtgatggaccacaccaactccagtaacaacgtcatccaaaataagcatcttacaaagcttggaatgctgaagacaccacaaggatgggtgatggcaggccaaccaccagtgcctcaacctcctgctgctgctgttgatattcaagtggaagactctaaggatgaaggaatggatccaactcagcctttgtactctcagtttgagtctcttatgttgcaaaagatggataatttgcttcaaatgcaacaagaattcaaggctgaaaccaatgtagccttagctgaaataagagataggctagataccatagaggccaatatcaaagaggatgcatctgaaaacttctaggcctatgattgtttagtttttcatgctttgttttttgtttgtttattttatgttttattttcattatgtaatggcttccctatgaagatataaacttccattatgtttctctttcaattatccgtcgtgcatgataagtgccatatttcagtaaattataggatataatatggcacttatccggcattttaatagattcaatcacaaaataaccctagaaacctagttaaatgatgataataggaagataagcgatgcttttgtattttgataagctttcgtccaaataattgattcttgttttgcaaggtttaagagttacggaaggcacaagattacgaaagaaggagcaaggagtgaagaaagtaaaagaaaaggcaccaatagcattcctggcccaagaaaccacaaagcccaaaggattcttcagcattaagtcaattagctcgcccaggccagcattcctagttcattttggtcgcccaggccacttcaagttccaaggagccgaccttagctcgcccaggcgagtggacttaggctattttaggcgcccaggcgaccttagctcgcccaggcgagtgaatttagtacaaatggggcgcctgggcgagtggtgtgaagcaggtggccaaatcctataaatatgggacgaatttgaaggccagggaaccattctttcacttcttttctctcctaggcacttgcttgcctttgtttctttgtttttttgtttctaagtgagtgtagaacttagggaagtgaggttgtgtgaattgtgtaaggagattctgccgaagagagggtcgatgacgagcttcgtcggtgactctcttgaggaggttttgcctatgtctgcctaagcttctctaaggattaggtgtactcttcttatccctatgctcttttaattatttatgcatcattctatttcttgttggtaatttaattctatgcttaatgcttgattctactggatcactagagtcacgaacttaaattcctaagtgagactggaaagtaatcttagggtttgaactaaattaaattacttgttacgttacgttactaggaatagagcataatgtttcgatcgcattaaacacgtgattatgatcttaatgcttgggtatttaattaagtatgcgaggaatcgatatttagtaaaatatccatagggcttaattgcgaggaatcgagttaagtttacctaaacgtgtgcgtcaacaagaatagaaaatgcataggtaaaatcaatttaagggataagcaagacgaaacctaatcctacattcacttgacttgtatctgtttatttatttcccgtaatcgtttacttgtttccgttatctttattttacattttccgcaacaacaaatgaatcttcgctctttcttatctgtacataactactaaactgttaaattaaatcaatcgacgtaaacccaaatccctgtggagacgaacttttataaatttgaaacttacaacgatacaacggtacgcttgccgtggtgattgaaaaagtgcactttacattttttactttaacaagccaaatagggggagaaataattgattttggacaagcactgcatactactttgtttatccctgttttttgttcaaaattgtgcccaaaatttaatttgaatggattgtggaatttagggggagctaagtgctttaatgaatctaataaatcaataatacttgtaaatgaatgctaaatgaatcacaaatgcttttaacacttattctttgcaaaggaattgaaaatttttcaggtttgcaaagctcaagcttttcccaatattggttcatcaattaaattcaagtccaactgttaatcaattttggcatgtttaaagccaaaaagggggagattgtttgattcagggggagctacttaaagaatgcaaaggaattttgattcaagctttggttttgagctttcaacatgcaatggatgccttgaagattaattagtgtgaaatgtgtaagagaaaagcaattctggtgatccaagtgcattgcattcatattaatccataattcaatcaattgggttcataaacatcacaaggctttagttatttgattaagtttttgatttgattcaaaggtttttggaaaaatacatttcctactggtttaatcgattaccttaatgacttaatcgattattttgttcttagtctattctggaaaagctttcaagaacaatgtaatcgattacctatcggaataatcgattatttgacctttgtttttatataaacttccttgttgaacactttaatcgattattaatgggtagtaatcgattacatagccttatatgattttaagtcatactcaaataatcgattaccaaagtatagtaatcgattacacaagcttaattggaaaagctgtcttcctgctttaatcgattaccatatttcgtaatcgattacactatatgttaatgcttacaagacttgctggtttaatcgattaccacatatagtaatcgattacatagttcattctgtttttaaagactcctgtcttaatcgattaccaaagttagtaattgattacatagtgcattttgatattttgaagcttcctatcttaatcgattataagacaaaataatcgattattttgctctttgctcatgcccagaaactttgtagaacattttaatcgattacaaggtttatttaatctattacatgagcattttaatagattattaggtgcgtttaatcgattacaggcagttacaaaagtttgttataaataggactaaggctcagcttcttttctaactttatggaacattacccatacgtattttctgagtttaaacagtctcgtgagcattcttaagtgatttctaagggtttaattggttcttgctcctttgtgccttgatcatgggtgtttaactcaatcttggagcttgaaaccttttcaagattaaggaaagctgtgctaattgatttgcaatcattcaacctaatctggtaacttcattttgcattgcatcattggatcatcaggttgtttctctacttaatctggttgtaatttttgttttgtattttctttgtgatttggctattgtaattggattcttgcttgaaactagagaaggggttctctaggtggaagaactgagtagtgttctcaggtttttgtctcttagaatctaataggattttagatttttgttctttatatagggtttataaagggagacattgtaattgattgtaagaactgaaaattataatagtggaactctaacctagtgttggttggaagcagtataaatttgtttgtgttttgattctctttcccttaactcttatattcattgtgttcttgtttaaattgcttgaccaaagtcagttttgatccattgaattcctcggggctgagctacttgattgaataaggtttcttggtttttcaaaagtgataaagatcctaggaactctgattttgattaaagaaattttaatttaccaaggtttaaccaattcacccccctcttggttaagtgtgagatattcatattctttacaggtctacccttggcacacaaaatctaagacacactcttggtacactcactccaatggaacctcgacaagcaaggacgtaggatcatttatttgtaggaatatgcgccaaaggttcacccttgacgttcaaaacccaagacatactcatggtcaatttattccttcggaacctcagcaagcaaggcccgaagatcaactactcgccctcgaacaaataggtaaaaatgagacactatcagactgtaacgacccgcctcgtcgctacgatatcactaactctaatcgtgcaaagtctcaatttttattgaaagcttctttaaattgattatgaaatggtagaaatttttttgcgataatacaattatcgtacacacaatacaattacataattgaatacatatctatgtatattttaaaccagtacatatcatttacatgtcagaacttagtttagtttttacctgtatttacacctagaatttacatgtccgacagaagaaatcaactaagaaagagtggattaacaaaacataactcttttccaaaaagaattccaatgtcatcacattggcttggcggctccaacaaaagaattctgcctccatggtcacctactgctgttcatctgctcccacgaacgaaggttcgcgatcatcataggtaccaaccacacggtacaaaattgcaagggtgagtttattatgcataaacaacaagcattagaggataataattagaaggaaacaacaataacaaccacaatcattctcaatgatccatcaattcaatacacagacaacaaaccagtcattccactttatttcacaaatcaaaacaatcatgctcagaatgatacatcctcctgatttcactttcaccatgtaatgtggtaccgtactcatggaaatagcctctctctggaaaaatgattcagacgcctatcagggtcaccctgtcgtgcactggccattccccccacggtgatcagcaagtggtcacaagggaattccaaaccagatggccccttagtacctgtgttttcgcccataaaaactcacaagtacgtgctgccttcattctatttccatccatgcaattatgaagtatgaaacatgggcaccatcaatgtatgaccatggctaggaacaaatccttcctcgcaagggtaaccagtcatacacccccatgtacatacacaacatacaaatatgggctcaccaatgcattgatcatggctaggaacaaatccttcctcgcaagggtaaccaaccggtcactttaccccacgtgtacatacacatcatacaaccatgggcaccatcaattcataaccatggccaggaacaaatccttcctcgcaaggataaccagtcatgcaccccccataggtattcgtgtatatccacatcatacaatgacattgtccacatcaatactatctcttatcaatatcattatcaacatccacatcatgtaatgtctggtgttttaagcatgtaattaagcctagattaagcctatgattaaggataatcattatgcttaagtgttttcaagagaaaggcttgagaaagagatgaaataggctgttctggcctgtggcgctagtagcgtgagtatggcgctagtagcgtgggactgttctggcctgtggcactagtagcgtgagtatagcgctagtagcgtgggactgttctggcctgtggcgctagtagcgtgggtacggcgctagcagcgtgggaagggctctagaaaaccatgttttcttctggagttccacgccagtagcgtggatgtccacgccaatagcgtgggttacccgagttcatggcgcgactagcatgggaacggcgcgaccagcgcgggaccgacggatcagttttataaatagcccattttggggctgaaagagaaaaggaaaaagagaaaggaagagagaagagagagaaacctccattgatgagtttgagagcttcatatcttctccatctttcatctaaacaccttagacccaactgagaaagtgttcagagcttcgagatcagctagtgacttagcttgattctcgagaaaagtcggtctacggcgagatcgggattccaaagggagcttttggaatcggagaatcaggaccagagaaggctttggctgagcgatctgtcttagggaaagtggttccctagtgtgtctgagctacacagaggtaagaaactcgagctctagccgttggttctgtatttgggtctttggttagattttgaatatcttgaggggtgtttttggaagtgtcagagccgttattaggctcggactctgtagagtcttatgctcagaggactgttctgaggaagttagagccttgcattatcattactgatgaagtttgattttggctctgagtctgcatgagcagagataaaaggttgactatttgactagtctggaccttagagcagttgacaaagttgctcatgagatgatatagatgagtttgaccggttgaaactggtgattatgagaagttgagcttgagctgtaatgctcagtgtggatggctggtgctgagtctgtggggactctgaggccatgtgtgttttggaatagaccactgagggtctatgaagaggcttgtagtgggatgagcctgaggaaccttaggcagaggacctaggttggtggagaggattgtaattcctttccctgaggcaggagtgactgcctgatgagcttattggctgatgatatgtttgtatggtctgtaatatgctgttgtgtgccttgtcagggcttgacactttgagtgtcagtgaagcagaccatcgatcaaggagcagagctgcgagatacggctaagaggtaagctcatcgttctggggattcgtccctttctcttgtttgccacccatgtgggtgatgaaatgcatgccatgcttgtgatgatatatgtttatgtatgtatgtgtaagcatgctagaatataatggccaatgtggcctatctgttagtgattgaaccgacaccgaggtggtgtcattgaaagtatgaaaccccaggttagacactgagagtgtgaggggaatatacacctgtgagataggttgagaggttttgggcttgaatggatgaacactgtgcggtgttcagtgttctgggtgagagtgcagatcagggaacgatctgtgatggaacctataagttaccgcgatggtatcgggctagctgaggttccctagccagaggaagagtgtgaggactcccgggaacggctggtattccctgggaggtgccactgctctccgtttaagtcctaaggaccgatgaccggtatggagattttccttaggcatttgagctgaaagacctgagtgatggtgctcccttttgtggaatgactcctcaggcatatgtgatagtggaaagccctgtggatggtgctccctgtgtggaatgacttcccaggtagtagaagccctatggatggtgctccttttgtggaatgacttcccaggcagtggtaagacctgaggctggtgctccctgtgtggatgacttctcaggcatgtgaatggaagtcctgtgggacggtgctccctttctggattgactccccaggccgtgaaagtcctgagtgatggtgctcccgttgtggaatgactcctcaggccagtggttggaagtcctaagagactgagtgcctcctgtgtgagatgatctctcttaggcatttgagctaaagtcctgtggatggtgctccctttgaggaatgacttcccaggccgatgatggaaagtcctggatggtttcccaggccagttagtgacagatatgtataagccagatctggatatgtgaagtcctgagtgatagtcctcaggcattgtatgtttattatgagacgatgcgtctctggttgatacagtgtccagtgggtgacactgatgatagggtacctctaggagataggctttaagagccaacattagatgttgagaccagggatatgactttgaccctgagagatggctgtatgagccagtgagaggtgtatacctcggatgttgtgagcatctcatgttgtgaccccagatggctgggatgtaggggtgagccgggatgacctccttggctctattatgtgtatatcctgtatgtgttgggtggtgagtcagggtgcgggaggctttcccagaaccctgagtttactaagacgtttgtctcaccctgtttggggtttgtggttttcaggtgcttcttctggagcagagaagcgatctcagggcaggaggccctagtggagatgacaggctggaggaggctgcagttgaagttccgacaagagcttccagaggcgaagctggtctttgtatctctgtttagggatagggtgtgagtgtacaccccttgtactgtacatataacgatgtacgacccagctgtggtcttgttttgagcatgtatatgtacagatgatgatgttgtataagtatgtttcctcctgattatctctgtttagtttatgtttctgcctattattgttgtttatgtttatctggatcagcagggattatgttatgatgttggtgttgtgtgttattcccatgcataatgtaatcaagaaaaacgattctatcgcttccgccgctcgttagataacgccgatagcgcgcttatgatacgattaatgataacacgtccggggtgttacatttaatggtatcagagcaggttcttgataaaaacattatgtatggaatggtgtgttgcttgctgctgttgtttgatctgacatgagcattgcatatgggtacactatatgtgggcctgatcaactcactgtttgtgtacatgtgcagtgtcatgccgagatccagaagtagcagtaggacaacccatgcccagtctgatccagtggctgctgcgatggcagccatgcagcaagagttagctgtaaataggcagactcaggagatgatgcagcaagaggtagctgcagctagacaggcacatgaggatatgcagcggcagagagctgctgatttagagaggtatgaggccttgatgaaggccaatcatgagttgctagaggagatcagagacctaaggaggggtgacagagcattccccacatctcctacgcatgagggcgaaggaagtcgccagcaggctagtgttagccacctgagaggggatcaggtgttccatggacagacagagatagatgttgcagcccgagggaaaatgcttattacttttcgtaagcatgaccctctagccttttatggtggatatgatccagttgccgcagcagagtggctgcaggctatggaaaagatttttgaggtgatggagtgttcagatcaccagaggttgctgtatgcgacctatatgttgcagggtgatgcccatgggtggtggaagaccacagcagcactgttgagaggtcggggagaggttcttacttggcagatgtttgaagcctgtttcttagacaagtattttccaagagatgctagagaacagaaacaggcagagtttgacagtctagtccagggggacatgactgtagatgagtatttggctaaattcaataagttggccacatatgctcatttcaggagatccatgccagatggtgagatcctagctgctaagttccagagaggacttagggatgagttagaggtgctagtggctagtagtggatctagagacatggacagcttggtgagacagtgtcgccaagtggagcaggtgctcagtagacaccgaggtaagcaacctgcttactcggtaggtcagtgggtggatagacccaggggttcggaaccaggtggcaagagcagtgagccggaagtgtatttgtctacggctcagagacgtatgcctggtcggagaagattactccagagacctggtacacctccccaatgtgatgcttgtgggaagtatcactggggaatatgttctacgggtcagttgttatgttatagatgtggcgagcaaggccactatgcgaaagagtgtcctatgaaggacaagcagccagagagtctccagaggtaccgaggagccgtccgagtttctgaccagagacaaggtatggttatatacctgttgtgtgtatgagtatatatataaatgtatatatatttgatctgtgtttgcatctccatctgtggaatggagagtgcacgcttcgaggaagcggtgttatgagatatggacctccctaggggatggatttctcctagtatggttggctcatgggtgatgatgatcccctaggccaagggaatagttcagatggtttcctgctattctcggaggtaccatatattgtgcatccatgctgagggtagtacccaatgggatgagacaggtgtaagttctagcctcaccctgggagaaggtttcctcccattccaggagatggtttcctcctgctttgtgattgatataggagatggtttcctcctatttggtgacttcattacaggagatggtttcctcctgctctgatacgtgtagtcaccctgtatgatatgttatgtggtgttgtttgagggccagggggccaggccaggtggccaatgtacttgaggtacgcccagcagaggctgggacaggtgttgaaacctcgagcatgatagcatgggagtgttccatgcttgataatcatctctgacagtgagttgagtgaacaggtcagagatgtgtgcttatcgatgaccagggatcatctggtctctagatgagagggaccaagttgttgatgatcagagtgcgcagcggaaagtccgtgatgccggtcgccagatatgattggcgagtgcttgtagaccagcaagacgtgtttgagtaggcatctggcttaagatgagttaagcccagtggtggtgcctaggattgagctgatagataccgtcttagctgaggttcgaaggaaccggttgatagtcatccaagggccaccgtgatgtgtcggtatcctgagaggatttcaggtggccagggatgagaggagacatggctatgaagatggcttgtgtctaacaaatcacttgattagtgacagtgaactaaagtgacctctagaggtgaggtgtacttcagatgtttgtgaacccagctgaggcttagggtagcctgccatcctcagagagatgatcagatggagcgagccatctagatcctggaggatgtgctgtgtgagtgtaccttagagtagggtacaagctgggttagacatctgcctttgatgaagttccttgatagtgataggtcacatatcagagaacttggcacctaatgaggctcggtggaagccgagggtgcaaggcttcagttgagttggcagaggaagtgatagcaaacacttctcgaacctgagatggttcagaggactcttgagcagattcggaggatcagagttatctgtgaaagctcagagtcagtggaaaggatatgtgacctagacacaagaaccccttacagtggataagggtgatcagaggtgtttgaagttgtttgtggtcatgggtgtaggatgggctccggagggagaggaggttgtcttccgatcatctgtatggcatgagagttgccatgtattccaagtgagtgatgtgatgggttcatcccatgtggaaaagcccgacaatgatcagatggagagaatctgatgaatcctacacgacctgtgaggacatatgagtcctgagtaggaccgggttaagccgagtggaattctgaggacagaattctaaaaaggaggggtgtaatgtaatgtctggtgttttaagcatgtaattaagcctagattaagcctatgattaaggataatcattatgcttaagtattttcaagagaaaggcttgagaaagagatgaaataggctgttctggcctgtggcgctagtagcgtgagtatggcgctagtagcgtgggactgttctggcctgtggcgctagtagcgtgagtatggcgctagtagcgtgggactgttctggcctgtggcgctagtagcgtgggtacggcgctagtagcgtgggaagggctctagaaaaccatgttttcttctggagttccacgccagtagcgtggatgtccacgccaatagcgtgggttacccgagttcatggcgcgactagcatgggaacggcgcgaccagcgcgggaccgacggatcagttttatgaatagcccattttggggctgaaagagaaaaggaaaaagagaaaggaagagagaagagagagaaacctccattgatgagtttgagagcttcatatcttctccatctttcatctaaacaccttagacccaactgagaaagtgttcagagcttcgagatcagctagtgacttagcttgattctcgagaaaagtcggtctacggcgagatcgggattccaaagggagcttttggaatcggagaatcaggaccagagaaggctttggctgagcgatctgtcttagggaaagtggtttcctagtgtgtctgagctacacagaggggtgtttttggaagtgttagagccgttattaggctcggactctgtagagtcttatgctcagaggactgttctaaggaagttagagccttgaattgtcattactgatgaagtttgattttggctctgagtctgcatgagcagagataaaaggttgactatttgactagtctggaccttagagcagttgacaaagttgctcatgagatgatatagatgagtttgaccggttgaaactggtgattatgagaagttgagcttgagctgtaatgctcagtgtggatggctggtgctgagtctgtggggactctgaggccatgtgtgttttggaatagaccactgagggtctatgaagaggcttgtagtgagatgagcctgaggaaccttaggcagaggacctaggttggtggagaggattgtaattcctttccctgaggcaggagtgactgcctgatgagcttattggctgatgatatgtttgtatggtctgtaatatgctgttgtgtgccttgtcagggcttgacactttgagtgtcagtgaagcagaccatcgatcaaggagcagagctgcgagatacggctaagaggtaagctcatcgttctggggattcgtccctttctcttgtttgccacccatgtgggtgatgaaatgcatgccatgcttgtgatgatatatgtttatgtatgtatgtgtaagcatgctagaatataatggccaatgtggcctatctgttagtgattgaaccgacaccgaggtggtgtcattgaaagtatgaaaccccaggttagacactgagagtgtgaggggaatatacacctgtgagataggtgtgagaggttttgggcttgaatggatgaacactgtgcggtgttcagtgttctgggtgagagtgcagatcagggaacgatctgtgatggaacctataagttaccgcgatggtatcgggctagctgaggttccctagccagaggaagagtgtgaggactcccgggaacggctggtattccctgggaggtgccactgctctccgtttaagtcctaaggaccgatgaccggtatggagattttccttaggcatttgagctgaaagacctgagtgatggtgctcccttttgtggaatgactcctcaggcatatgtgatagtggaaagccctgtggatggtgctccctgtgtggaatgacttcccaggtagtagaagccctgtggatggtgctccttttgtggaatgacttcccaggcagtggtaagacctgaggctggtgctccctgtgtggatgacttctcaggcatgtgaatggaagtcctgtgggacggtgctccctttctggattgactccccaggccgtgaaagtcctgagtgatggtgctcccgttgtggaatgactcctcaggccagtggttggaagtcctaagagactgagtgcctcctgtgtgagatgatctctcttaggcatttgagctaaagtcctgtggatggtgctccctttgaggaatgacttcccaggccgatgatggaaagtcctggatggtttcccaggccagttagtgacagatatgtataagccagatctggatatgtgaagtcctgagtgatagtcctcaggcattgtatgtttattatgagatgatgcgtctctggttgatacagtgtccagtgggtgacactgatgatagggtacctctaggagataggctttaagagccagcattagatgttgagaccagggatatgactttgaccctgagagatggctgtatgagccagtgagaggtgtatacctcggatgttgtgagcatctcatgttgtgaccccagatggctgggatgtaggggtgagccgggatgacctccttggctctattatgtgtatatcctgtatgtgttgggtggtgagtcagggtgcgggaggctttcccagaaccctgagtttactgagacgtttgtctcaccctgtttggggtttgtggttttcaggtgcttcttttggagcagagaagcgacctcaggtcaggaggccctagtggagatgacaggctggaggaggctgcagttgaagttccgaaagagcttccagaggcgaagctggtctttgtatctctgtttagggatagggtgtgagtgtacaccccttgtactgtacatataacgatgtacgacccagctgtggtcttgttttgagcatgtatatgtacagatgatgatgttgtataagtatgtttcctcctgattatctctgtttagtttatgtttctgcctattattgttgtttatgtttatctggatcagcagggattatgttatgatgttggtgttgtgtgttattcccatgcataatgtaatcaagaaaaacgattctatcgcttccgccgctcgttagataacgccgatagcgcgcttatgatacgattaatgataacacgtccggggtgttacacatcacatcatctcaatatcttcatcatataaatcaaactcatcttatttcaacattatcaaccacatcaacattgtctcattcaacatcatcaaccatatcaacattatctcatttcaacatcgtcaacatcaatggcatctcaatatcacaagcaatcgcatttcacatctatacataatacatatgcctgagattcacattccctaggtcttcagacaactcaaatttcatatattcacaattcatcataccacaacactgatatttttaggaaatttctaaattaaaaaggaagactacaatataaaaagcacactcttatgcccatttaaaaatttaataaagaattaaataggaaaacatattataaaattttgggcagagtctcctctgtaattaaggcttttccaaaaaatccaatcattacaacaacaacatcattcacagttttatccatcagtaacaaattcatcgcatcccattagttaaaaacacaatttttcttgaaaatgagcacaccataggaacaagcatacatcaatgatagatatatcacatcccattagtttaaaacataacctttcttgaaaaccagcactcaacagtgataggcatatatctccataattaggctccctgaccccaactatggtatcaaaactataaccaaatagtaaactctgtttacctatcgatctccctctgttagctcctagtagcatcgttttgagatctctcaagtttatgtgctttggcccaaatgcaaagctctatataccaaattgaagataatttagtatagatttcgaagacaaggttaacattaacattcgaggtcaaatacccactcaaatttaaaaaggggctaaaatggtgttttgagagtccacatcaaaaggacatcattttgaaattctgatcataccaatgcgatcggggctcaacaaaggtcaaaaatgacatcaatattataaaaaggaaacttttacaatgtctcattttcaaatgtttttcaaaggaagtgtaaaaacacccaataacattgtctaaatcgcaagagatatcaagagaggcttcaaactagctaagagaagacaaggaaaccatggttacctcaaagaaaccaagaaaggaggattagaggctccattctctaccgaatccttgagttgtgttttgaagattccactccgattaaagtgttcctcttcatgcggtggtccaaccgcaagaaacggtggctcatggcggtcaccggtggccgtggctggtggaggaggagggtgggggacttggtggctgttttggagaagatggaagcatgaaaatcgagatttcacgctgttgcatgtctttaaaaccgacttgactcgcccaggcaaattttggaaggcatattggctctcctgggtgagctgacccaaatttgaaatttctacttttgttaaaaattattatctcactattaagatgttatttagccaattccaacgatcaaaagttacatatgtgggttaggaacctacctttaaaatgggaaggtgatccaacgattaaccaatcaagaattgtgattttaccaaatcaggttttggatcaaactcggaatcactcaatttaatgcagttcaaacaaactccacataatttaacatccacactaagcaattgcacgaggataatttacacaataattcaactaatctaaacttatcaaataatcaaataacacaacaaatacatcaaacacttattttcagtttatcgaaatttcagggtgttacacagaccgtaggtctcattttctacgatgaaaggacaccattcaagtggcctaccttcataatcataagaaacttattacagaagacaacaacatacaaaaataaacacaagagattgaaagcgatgaaaagaagaacatttgtattaagaataattgttaaaagctttacatggcctccatgacccaaagttgacaatacaaaatacaaagatagatggtagcctagacattggccccatcatcttgctcttcatcagcaccctcctaagcagaagtaatctcctcttcatcaagcaagacactgcccttcacatccttggatgggtcaaagagacccaagtcaagatctttagcaaagaaaccggcctgcctaacggccttgagaaaacccttctcgtgctgctccacttcctctcgtttatagatggacaactcctcttcaagctccttgcgtgcagccttctcctcatccaactgagcctctaggggaaccaccttcttggtaagatcatccctttcaacagtaacgttgtcaaccttggcagctagttactttgcatttaacaatccctggccacgactagccaacttgtcaccatccaacctggtgcataagagcttggccatagcaccactagccttggcagacaaatgctggtgagacctgaccaccatagacagggacacaacaacactgttcaccttggcacgttccacctgccaaacagtacggatggcagacttcatcttggccacctcggcttctagcaacgccaccttgcccacaacctcctggtggcactgaccattttcttccaaaatagcaaggcttctatgaagaaaggtctttgcagaatcaatagcgctctcaacccaaccgagcggatcaagtttttgtcaaagggggtcagggtccttcgctctggcctatgccccacactccataaagattgaatgtccctcgaagcatgaataaactcgagggaggtgatagggtgagaggaagaagacggcagagtagacgtcgacatagcagaagccagtggagtagaagatgtaggaacaagtgtagtaagtgtagtagaaacatgatgagaaggagaggcagaaatagtagcaggagccaccgctggagcaggagtagcagtggccagagtagaagcggtcgaagtaggaggaggggcaggaaaagcagaaatagtagcaggtgtcgccactggagctcgtactgccgacggcaacaccggtaaactgggaagaagcccaacggcttccctcattgcaagaagactgcgaaggcgcatcgatttcttgcggcccgacgtcccggcatcatcgtctcgcttcctcttagctaaagtagaggaggggatggtgggagaagcagcaacaacatgaatagggccgatcgcagcagcgggtcgacccccgcctccagtaggagggttgacggaggtgggtggcataatctaagatccagcatgcttcaccaatggcctccatgggatgtcacccattatacctacaaagcacaccaaaatatgacaaatgtcaggtaaaaaaaaatacaaaagagaaaaataagacaagacaaaggggtttatcatctaaagaagcaaggggatcatctgccaacgctaaggacaagatggctcacgcatccagagaagtcgaaagctgctccaggatcacgttgtccaccctctccaccaaggtcaacaagtattcatcaaaggacttgaacctggtaggatcggacttccaacagaacaagaagcggggctccccgtcctggtggaacatcaatggcagcccatctgccactacaccactatcacgaaccttaaaaagatattccttgaaatgacagaagatattttagtcaaactcaaacaacttcttgaaaacattgttcaaggagacccaaccaatcttacccatcagtttcatctaaaaaaggaacaagaagaccgacacacttggtcggatattgaagaagggaaagagaatctcgaacgctctgaccactgcccaactattgggatgaagttgggagggagctacgttcaaatactcaagaagagcgtattgaaaaggagacagaggaagaagcaaaccaagtacctaaataaagcactggtacatgaaaaagaaaggcggagcacttggcgccgcctcaagaaagggaggtcatcacctccgcaagcttcaacaatcaccttgcgatattcttcaggggttatcaaccttagttgatgacacatggtgttcacatatggcgccaaagtaagaaaggatttatacctgagagtgtcgtccctaactcattcatagctaggcacgacaggggtggatgatggcgacccaacataacggctgcatcacacgcgggaaaaaacttgggcgtttccactaccattctttcttactcctcccgaagcagcaagaggaaggatggtggtgagaggcatgggttctccggcccaggggtagcggaaggccagtacaatgtgagtccacctttctccctgaggaggaggactcatcatcaggagtctcatggtgactctcctgtgaggagtcaccaacagaaatgacttcacgcataaagggttgtttgattgagccccttgaatcgctaccaccaagacccaaagcagagtcagaaatgggagacacaaacatttttcacagaaggacaagatgtaccttgaacggagaaaggagaaaaaaagaagattgaggaaggcgaaggaagattttggagaaaagaagatcaagaatgcaaatgatgaaagtgacagagaaacatcatgcgtccactccattcaaacggaggcacaacctttcaattactgactagatttgaaacaatttcctaagaatctgcgccacgatcaggctacactcacccactaccgcatgtctccagtacgtgcgcactccactagtattgcgcaaatgctacatgcgtctgtggcaagagacaaacataacacttgcttttaatacattctccaatgatcagataatggaaaaaaatgtccaacctggacacttcacttgcctagcatgtccgacctcgcctacagaacaaacatatcctccctggacaattcaataatgacagcttggacaacacatgtccaggctgggagcttgacaagcttgacacatttgcatttctcgtatttgtcgaggttaccaccatcgacactggacaacacttatccacactcagggggctccatgagctcacgactctcctacttgtcaagtctaccaccgttgacactagacaatctccatcgacacaagaagctcttacaacctcttttgcttgcaagttggctcagaggctgggaatcttatgtattgtccagaatgtgaaaaatacagtgaccatttatgcgggacccctgtacacgtgtcaatcttctgcgtcaggcctactacaggatcccggacgcactctctgttagtatgtaggtgtcctagagacaatctgatttatcagttgaacacattgtactatttattatttcatgattaataagagcaaactttatctttatcatatttatgtctcacctatatttatagcaatatgcgtttaaagataaaggcactaggaatagaacaagtgtacactcgaggatctatgatagggattatgatcatgaggattcgaggacactacatgtctattgcctaaagcttgttcctagtcttgaatcatcaagaaggggcattgatgatctccataagactagtacaaaatatcattggatatgtaaagtctctcatagtttggtagagcgaatcatcctagacttgaggatttcatcgaatactatgtcctagggttatactttgactgtacgactctatctgcctgaaaatggggagaacaatgtactctcatgtataacctgaatacatgagtatagatggacatgccgaaaggactcacaatcctttacgagggattagtcgttcacaagactggtagggcttggatgacttctagttgactcgggaatctatgatagtaagagatcatgaggagtcatgatctgtcttaaagtcaatagaagaagattcctagttcctgtgaaaagctatatttagtcaataaagagagatgatattttatccttgctctcaactaaatgtgaatgacaatgtgagggatgatggagacacggtatccaaattagaaaggtaaatcacttgatcaactcaattacttctggggccacaaagcattgttagtgtcttatgtggtcattaaatgaattgggcccgttaaaagagtttaattcatccaagtttatttatgtcagtgactaattgggcctaatgggtcacacacaaaggttattctttgctgcaagtcatagagagtttgggccaataattagttattgggctttatcaagactatgagttaaattgggttaaagttggacttcaagcccacttgaatcatgcgccctatttggggcattagtggtgaaattggtttctccactaatgggctcaaatgtgttgacaggcccgatgggccttgggccatgaatcctagtaagtcaaggagttgacttgaccaaaaataagttttgggcaaattcgaaatttgaatttgaaatttgaattttgaaatttgaaattttgaattttgaattcaaactcaaattcaaatcacaaaatgggataagattgaatttatatttaagtttaaatttcaaatttgaatttgaaatttgaaattgaattttgaattctatgaggttaggttgttgaggataattaaaattttctagatgaattatccaataaagattggatgaagattctctcaacaacattgtcatttgaattctgaattcaaatgagttattcttgcaacaaactttggagggaggagagggagagagggcggcggtttttggagagaatcttgctagattctttttcaaaattttcccaataacttgggctgatttggagtgagaggtgtaacgacccgtctcgtcgctatggcatcacaaactctagtcgtgtaaatttaaaattttaatgaaaactccattaatctgattatgaaaatggtagtaaggttttcgcaataatacaatcatcatacacatgatacaactacaacaaatgaatacatatgtatacatatactatatcaatactcatcattcacatgtttagaacttaatttagttttacatctaataacaatttaaaatatacatgtctccaaaaaggattaagggactaactatgaaagagttaattaacaaaacacaactcttttcaaaaagagttccaacgtcatcacgtcggcttggcggctccaacaaaaagaagatctctctccaaggccacgtactgttgctcatctgctcctacgaactaaagtttgtgatgatcacaggtaccagccacacagtacaacaaatacaagggtgagtttattatataaaaccaagaaacatcaaatagcagcaattgggaaggaaacaacattatccaccacaatcattaacaaaaatgcatgattctaatacatattcaacaaaccaaccaaccaatacatttcacaactcaaacgatcatacgtagaatgatgcatgcacctgactcatctatcagcatgcaatgtggtaccatatcccggaaatagcctctaacaggaaaaatgattcaccgcctattatggccaccctatcgtgcactcccccacccggtgatcagccagcatcactagggaatttcaaacttgatgaacccttagtacctacattttcagtgtaacgcctaattcatttctacttatttacttatttatttttacgtataaaattttttcttcctttttcattgctttttaattttcgaaaatgcaataatagcccatagttgaattagagttcatttaatttttgaaaaacaagtgatgaaacgtagtgagctttatgtaatggctgtaaatattaaacatacatacgcgtttagttatcataatacatatccagtcataatacacctagttcagagtcttccaagtacacatcaaacagcaaaacattataaatcttccagaacctcttctcagctcatccaaatcctactgttcatctgctcgcccaaaataaattttggggtcatcacaggtgtcaaaccacagacacaaattatggtaagtctatgttaaccataattaaaataagcatttaaatcaaaatacatagatatgcacttctatataaaccacacgaaattttaattaaacccagagtgttcaacttcacaacttttcaacttatggccatggtcaaaatagctcaacacggaatcagagcgatcgagtcaggataggtctgtgttgcaataggactcacacctacacagcatgtgatcatcatgggtaggtgctttccccactgaccttatccccaagttcagccaccatatgtctgaacgctcgtcataattcagctatatgacttacctcctttgaggtttaacaacttcaccacagggtaacaacaactccaatactaccataatcatatcaccacaaaataacaacaactcacaaccatgtttacttttaacacatacaacttttcacttaaacatcaacatacacaactttcttcaattaataagcttaattacctcaataaagtattaggtcaaataataatctcaaccacataaaggaaatatacagatcacataaaacttgtaaatagaataacatgtaacttctttaactttaattattttcttaaaacctactattgattgtatgacaaataaatttagtaactttagacaaatccttaagaaagtatattcatcattttatcatcaaaataaagtgatataaagattcatggatgactagtgtacttactttagtaaaatatgttcatagaaagttagtataaaagttgctctaattagttggcttcctaactcattaccttgagttcctaaatcatattatatccaattacaagtcctaggtctttcttatcttggattatattaggttagttcttcactaatcaatggttaactaaaagtatatcgtcaaagtcataaacttgttatgtcaccatcttgtttgcttttaccaaattcccactacacaagcttgattttgattaaataacaatttaagaaacttaaacaaatgcatatttaactaggttaaatcataaacttcccatacctagaccttttcttggattcttgaaagcttttcccttccttccttgctttccacgtgaagtccctaagatgtggtcctagtcttttgctttttgtgtaaatgaaagtggaaaatgatgggagatgactttggtgaaggcttgcacggtttctactccttttggatgaccaaaatttccaaaatccaagccttttataggtggtaaatattagttttttactacatgaaaatcaaggttaatgatggcttactttccttgtgttttaatcttattggctagggtttcttatctttccaagtggcttcatcctccacctaggctttttacttctcccttgatcttgttacatgtggaaaggaagattagctttgatctaaaatatcttgaaagcatttaaggctaactttttacttggtgattccttattggctacttcaccttaaccttccaagtggccttattcttgaaaattctacactcctctcccttgttatacgttggatattattgcttggagagcaatttccattaatttcgtagcttagctatactttgtgcttttcttcattcttgacttttcttcaaaacccgtattagaaaaataatggttctgaattcattaaccgttggatcttcttgaaattttaatggtatactcctaacttacatatctagcctttgaccgttgggatctttgaaataatgcttagcatttccttcgtatccaaaggagtcaagagaaagttttcttcaacaaaaatctccttaagccatcattactttctttacacatgctttccttctattgactaatgattttggtccatccaagtgtcatgcttcttgaaaattcttcacttttccttcctctttcacgttggattgcatccttggagagcaagcctttcttgatttccttttctcacatggaatgccttagatttaagtgttttgtgttttattttcctactaggcttttatctcttttcctattggtccttgtggccttcttttgtttaaattacaaatctaactcatttaaggaatccatttatcctacaattaagagaaaactccaaagatcataacaattattttcctataattttctaatttccataatggtcttaaaattgagttttctcaaactttttctaaaaattcctaggaatttcattttataattcctcatcatatactaacttaagattgtcttatctaaagatattttatccattttataggtcctacaaaattttctaagtcatctggtcattttttatcacaggggtattttggtaattttacccttctagggacgtaatggtaatttttctaattgtccaagggtaattaggtcattctaatctaaaatatcttaccaaaatatctagaagtccaaaatatcttaccaaaatatctaggacccattggtcatttccttaaatgtttaagggcaaaatggtcatttttgccctaagggcattttggtcatttctaaaatgtctaggggtattttcgtcatttctctcaaatcttttgtactgtctagaattaccattttatcccagtaattgactgtacttcccaaaattttggggtgttacattcagcccactgaaactcacaggtacgcgcgtgccttcattctatttccacacatacaaatgaagtataaaacatgggcatcatcaatgcatgaccggctaggaacaaatccttcctcgcaagggtaacccgtcgtgcacccccatgtacatacgtaacacaccaatgtgggctcaccgatgcactgaccgtggctaggaacaaatccatcctcgcaagggtaaccaaccggtcattgcatcccacgtgtacatacacaacctacaaccatgggcaccatcaatgtatgacctggctaggaacaaatccttccacgcaagggtaacccgtcatacaacccccatgggtatccatgtatatccacacacaatgacattgttcaaatcaacattatctctcatgaatgtcattatcaacctcaacatcatatcatctcaatatcatcatcatgcatatcaatattatttaatttcaacatcatcaaccacgtcaacattatctcatttgaccatcattaattacatcaatgacatctcaatttcaatatcatcaacgacatcacaagcaatcacatttcacatctatacataatacatatgcctgagattcacattccccaggtcttcaaacaatccaaatttcatacattcacagttcatcatatcacaagatttatattttcaggaaaattctaaattaaagaggaggactacaatatataaaacacactcttatgcccatttaaaaacttatataaagaattaataggaaaacatattataaaattttgggcagagtctcttctgtaattaagacttttttccaaaaatccaatcatcacaataataatatcattcacaattttatcgatcaacaagcccattcatcgcatcccattagttaaaaacgtagtttttcttgaaaaccagcacacagcagggacaggaagttatcttcacagttggactccctggcccccaacaatggtatcaaaattgtaaccaggtaataaactccccttacctatttatatccctctgttagctccttgaaacgtcattttgggatctctcaagttcgcatgctttggcccaaacacagagctctatataccaaattgaagataatttagtatagatttcataaacaaggctaatgttagcattccgggtcaaataccaactcaaatttaaaaagaggctaaaatggtgttttgggagtccacatcaaaagacatcattttgaaattccaatcataccaatgtgaccgaggcttaacaaggatcacaaaaatgacatcaatttcataaaaaggatacttttacaacatctcattttcaaagggtttttcaaaggaagtgtaaaactccgaacaacggtacccaaaacacaagagacactaatagaagcttaaactagctaggagaagacaaaagaaactaagattacctcaaggaaaccaagaaaggaggattgggagccccgttctctaccaaaacttcgagtagtgtttcaaagattccgctccaattaaagggttcttctccgtggtgggatctcatggcaagcaacagcggcttgtggtggtctccggtggttgtgggtggttgaggagggtgatgggaagcttgggaactgtttggaggaggaagaaactccattttcgtgacttggaagcttaaatacgtattcaacactgccttgactcgcccaggcgagcaaaagtgcctgaaaaattcgcctgggcgagttaaccagattctagaatttttgcttcagtgaaaaattaatttctcatgctacatacatgttgacaatcccaacggtcaaaagttacatatgtgggttagaaagccacctttaaaatgttaaggagatccaatggttaactaatcccaaatagggattttactaaaacaggttttcgggtcaaactcagaatcacacaattcaacgcagttcaaacaaactccgcatgacttgacatctacaccaagcaattgcacatggataattcacataacacaagaaatgcatcaaacatctacattcagttttcgaaatttcagggcgttacaagaggatcatgcaatgcaacaacctcatcgcactttaaactggctcctacgtggggaggattaaagggtagaaattttcgtcccctcctctcttggttctgaaccaagttctagcttttcctctccctcatcttctctgctcttttgctgcaccctcacttgagcttaaggcaccattatagtcttgagaaaagaaaccaaatacttgtaagcctcacacctttcatgcgcctggcaagccaacaaggagaagaaggaaacaaggagaagaagttctcacttgcaagaaggagataactgtgtggatcaccattggagggcgtcatcttctttctgtgcaatgaaattgatttacaaacaaagcaattaagagatgaatagatgagaagaaagattagccacagatttttatactggttcacttcaaacactatgaagctacatccagttcttccactcaacactagagtagagtttcactattgcaaaaatattcttacaagcaattacaagcctctctttatcaaccctagataaagttcagaagtctaaaacactattagacccttagagaccaaaacccacattgagaacactactcagctgtccttagagaaacactatctctaaccttgcaagaaacccatttacaatagactaatctttacaaaaattcaaataacagttttacaccttcaaagaacaaggaaagatatcacctgataatccaagaattcatgcacatgaatgattcaacaagttgaatgacagattactaactcaatgcattccttccttatgctttgatgaacaatgatgcttcacacacttgaatcaaaaacccataagagtttgtgaagactaatgaattttagaaactcaatgaattcacagaagaaagctcaagaacgtgtatgattgcctaattttcgaattatcaaaagttacaaagcacaggctgagaggttctatttataacagctttctaactgaaaataatcgattaaacacgctcctgtaatcgattatttcgcatgtgtaatcgattaatccaagaatgtaatcgattaaaatgctcctaatgagttctgggtttgagctatgaacaatataatcgattattccgtgaagtaatcgattaagacagtcaggcatgtttttctaaatgtactaagtaatcaattaaaacgatatgtaatcgattaagccagtaggacatgtttatcataggcacggatgtaatcgattacgaccatctgtaatcgattaagacagtcaacatgattttcatattttggcctatgtaatcgattaattcgatatgtaatcgattacaatgatcatgatttgttttctaaaggcacgaagaacaaaataatcgatgtcattagctttgtaatagattaagccagtaaggattcatttttccaaaaactttgctagttaaaaaccttacttatgaactgtgtaacaccccgtgtgcacccggtgcgttatcatcaacaatatcagtatcacgctatcagcgttatctaatcgcggtgcggaagcgaaagaatcatttttcttgatttcattatgcatggaatataaaaacaaaccatataatatcatacataagcccccattgatccagttaaacagaaacatacaaacataggcagatacaaacatagaaatctaaccagagttatcaggaggaaacataaactcaaatataataacattatcatctgtacatatacatgctcaaaaaccagaccacatctggtcatacctcataattatgtacagaacaacgggtgtacactcacaccctattcctatacagaatactagacagagataaaaagaaagagactcttctagtcttcatctgcaacccatgaccgctccagcactctcagctagggcctcctgccctgtggttgctcctctcctctagaagcacctgaaaaccacaaaccccacacagggtgagacaaacgtctcagtaagctcagggttctgggaaatcttcccttaccctggttcacctccaagcacaaacacataaaacagataacagagctaaggatatcgtcctagctcacacatacaatgtctaggacatcgtcctagctttcacccatcccagccatctgggtacaaacactggatgccatcagcatcggaggtctcccacctcatactggctctcaagccatctcaaaactcgtctccacagaggtacactaccatagtgtccaccccaggacacatcttatatcagaaaggcaccgcctcatcactgaaccagcattgcctgagttacctactcaggacttcacacacacattgcctgaggattctctcaactcaggacttcaagcacattgcctgaggaatctctcaactcaggacttcaagaatccagatatggctcatctaagaggccttaggctctcatcccctcgggaagccctctcttagagatacaacatatctgtctactgcctggcctctccaggacttccatgacacatgcctgggcaagaacatccataaatgggcaatcacctccaggactttccacatcacatgcctgagagagatcatctcacacaggaggcactcaatctctcaggactttccagtccaatgcctgagagggatcatctcacaccggaggcactcaacccctcagggcttcacatctcatgcctgagagagatcatctcacaacagaggcactcatccctcaggacttttgttgcgatttttatatgaatacggcaagtgcaccgatcgtttaacaagtaataaagtgatgaagtgaatatcgtctccacagggattgcagtaattttgcagtaattcgaacgattgtgattgaaatataaaaacagaaattaaacgcaagtgtttggttgagtattgtgttgattaaaactaaaaaaagcagtaaaattgaaattaagaaattaccaatgagtagtaattgtggtcaggcacaatcccttataagcattacctctttcacttgactagttttgttaacttgaaatttacataagataagtctctcctacaactgtaaatactagataactagtgatttcgccctttaattcgatcgagaatcctaaccttctagcgattctgtcaaattaagaattcagagaacaaatcctatgggttcgtgttatgtttactcggagaataagtctttcctatattagttaacccctaatatcttagtagactaaccctttaaactgaattcataacctaatgtcttagtgaaatgagtcagtttaagcaattaaagaacatattatagactccgcactcatgcatccctatgtctaggtgaagaacaagtgttattcttaacatgtcagatattacaaccccaacgtgtccattgcaaattataactctcaatacttatctagagtgatcaattctaaacaagataaatataagcacagaaaagaagtaaaataaacaaaacatatgcattcaataccagtcaaattacagaagataactcataagttcatggccttcccacaacagacgcttagcctgccataggcctcaagaaaaccaaagcaattgaatgagacattgttgtgtagaactttggcttgaagacttgatttctagggtttacaataatctctgtgtaattctatggcctttactctgttttctgatgattctcccttgttcagaggcctcatatatatagaaccatttaattacagtaactaagccccaaaaccgcacctaatctcaaaacagatctttttaattcaggcaagaaatcgaatccacgcgacccgcgcacgatttcacgcgtccagcgtgaagtggcagaggaaatggcgctggtagcgcggagttggcgctactcgcgtggcttgacagaaagaaatctgcttgatcattgaaattctgacgctactagcgttacctgtgacgctactcgcgcgggttggcaggaagaaaaaccctttatccttgaagttatggcgcgacacgcgtgaaaaccacgcttgtcgcatgaattcttccagtgaatgttcttcaagtctggtcttgacgctgccagcgcggtattggcgcgactcgcgcggcactccagacttttcttcttcttttatttgctcttgagttcctccttttggcctgcaaatgcttaaatggtattaaattgcttaaaacaattaaaaatactaaaaagaactgattttaaaactttttttcctaacaatttaataaaaatataccctaaaactaagctaaaaataagatgtgtttgcaacacatcaactttcccctgcctgggagagatcatctcacacaggaggcactcaatcccccaggacttccagacacggtctgagagagatcatctcacaccggaggcactcaatccctcagactgtcaatccactacctgagagagatcatctcacaacggaggcactcaatctctcaggaactccacaacactggcctgggaaaaccctccaggactttcacatacattggcctgggaaaaccatccaggacttaatcacatacctgagataaccactcaggattctcaatatctctgcctaaggaggaacctccatatagggcaatccacccttaggactttaatggagagcagtggcacctcccaaggaatctcagctattccagggagtcctcaaactcttcctctggctagggaacctcagctagcccgataccagtccggtatcctataggttccatcacagaccacctcatggtctgcatttcatcagaatcactaaacacctcacactgtctcagtgtctgacctagggttcatcatataatcatatttctagaacggcctgagctccactccaaggaccgttatcagcccttcaggcttccagcacacacacacacacacacatatatatatatatatatatatatatcaaacatatcatgcattcatcaccccttacttgggtggcaaacaagagaaagggaataatccccagagcgatgagcttacctgatagatgtgccggcaactccagcctctagaacgatggtctgctcctctgacacctcgtgtcaagccctatcaaggcacacaaccacatatcacagaccattcaggcacataaacaatcattcgctcatcagacagtcctcaactgcctctgagaaaggaacctcagtcctttctatcaacccaggtcatctacctaaggttcatcaggctcatcctctacaagcctttccatagaccatcagtggtctattccaaaacacacatggcctcagagtccccacagactcagcaccagccatccacactgagcattaccgctcaagctcaacttctcataatcaccagtttcaaccggtcaaactcatctatatcatctcatgagcaactttgtcaactgctctaaggtccagactagtcaaatagtcaaccttttatctctgctcatgcagactcagagccaaaatcaaacttcatcaataatgataattcaaggctctaacttcctcagaacagtcctctgagcataagactctacagagtccgagcctaataacggctctaacacttccaaaaacacccctcaagatattcaaaatctaaccaaagacccaaatacagaaccaacggctagagctcgagtttcttacctctgtgtagctcagacacactagggaaccactttccctaagacagatcgctcagccaaagccttctctggtcctgattctccgattccaaaagctccctttggaatcccgatctcgccgtagaccgacttttctcgagaatcaagctaagtcactagctgatctcgaagctctgaacactttctcagttgggtctaaggtgtttagatgagagatggagaagatatgaagctctcaaactcatcaatggaggtttctctctcttctctcttcctttctctttttccttttctctttcagccccaaaatgggctatttataaaactgatccgtcggtcccgcgctggtcgcgccgttcccacgctagtcgcgccatgaactcgggtaacccacgctattggcgtggacatccacgctactggcgtggaactccagaagaaaacatggttttctagagcccttccgacgctactagcgccgtacccacgctactagcgccacaggccagaacagtcccacgctactagcgccatactcatgctactagcgccgcaggccagaacagtcccacgctactagcgccatactcacgctactagcgccacaggccagaacagcctatttcatctctttctcaagcctttctcttgaaaacacttaagcataatgattatccttaatcataggcttaatctaggcttaattacatgcttaaaacaccagacattacaaactgcctttatttaatccttttaatctaacaatcctagatgaatgattcatgcatgatatgcttaattggattatcagatcataaacttcctttcacattaatcaaattggtcttcaagctttcttggtactttgtccttgagcatgttgaaagcacaaaacacttgagtctttgattccttgtttatttgtacatggcttcacttgaatcaacattaatgaattttaagaacctgtaatcgaccaaggggttgccttgggttttgctggaggttctcctaggggagccctagggttttatgaacctttggagagtattaggacgcatccgccctggagtttagcaaggcttgtcaaggatgaaccttgataaataccaggacatggtcttgggtttttgttgaagcaggacataggagaatgattaggtgataattcctgcaattggtcaaaatcttgtaatcttgacgtaagaatttgaaagagaagaggtatgtgttttattagtactgcactttacatatcctctgttatttccgagatgagcctcattaaaacctttcaatccaaaacccaggggaaaaagacttaaataagaaaaagagtatgtcatccggttctgaaagactcagctaaagtaaaatttcaagggggtagcattccaagttcttggaatgtctttgccattgagttcctatagtttgtaggcgccgttgtccaggttggtgataactctgaacagaccttcccagtttggttcaagcttgcctacacggggatcttttctggcttcaccctggacatgccagacatggtctcctggttggaaatttcgaggttgaactttggagttatatcttcttgttctgtggagcttggttgcttcttcattaattttggctatgtctcagagctcttcacaagtttcgagttcaactttcatgttgtcctcgttgcattgttcctgaaaaagtatccttcttgacaaaggttcccctagctcgacgggaatcatggcatcagtaccatacgtgaggcgaaaatgggtttcctttgtagtgctttgaggtgtgcaatggtatgcctagagtatgttgggtagttcctcccttcagagacctttggacttgtcaagtctagtgcgaagggctcagagaatgattttgtttgctgcttccacctgactgttggtctgggttgttcaacagaggtgactaggtgtttgatacctagtcgggtgaggaagtctttataggtctgtgccttaaattgtgtaccgttgtcagtaacgatagcatagggtagaccgtatctgcatatgaggttcttccaggtgaaagtttcgacttcgttggttgttatctcctgtagtggctttgcctcaatccatttggtgaagtagtcgattaccactaatagaaatttgttcatccctggagctttagggaatggtcccaggatatccattcccccacatagcaaaaggccatgaagaagaaatggtatgaaggttgtcagggggaatccgtgggatgtccataaactcttgacacctctttttatcgtcattgtaactagtaattttttaagagaaacgatgtttgttatggagatttagatgcaccaacacatgtaaatttgtaaaagaaacaataaatgatgatttgtgtttgactaaaaatagatgttttttttaatcagtataaactatgtaaaatataggaacacttcacacttaaccaagagggggggtgaattggttagtcttggtaaattaaaaattttcatttaacaaaatcagagttttcccttaggatctttatcacttttgaaaccaagaaactttattcaatcaaatgttcaatccaaggtattcaatagctcaaaattgaattgataagcaacacaagacaaacaagatgaacagaatataatcaagaaagaaattaaaatcaaagcacacaagatttatactggttcacttcaaacactatgaagctacatccagttgtcttccactcaacactagaatggagttccactattgcaattttctgttcttacaagtaattacaaagtctctctttatcaaccctagataaagttcataaatctaaaacactattagattcttagagacaacccactgagaacactactcagcacaacccctagagaaactctatctctagattacaagcaagaaacctaattacaatagacaatcaaatacaaattcgctaaagaattacaacctcaaagtttaaggaaagaaatcacctgatgatccagtgaatgatatgcagatgaataaataatcaggttgaataatgaaaacaatctcagaacatcactttccttatcctttgaaaagaatcttcttgcttcaagaatcacttaacaacccataagtgttttagtgaaagcaagaactcaatgaacccagaaaatcactaagaatatgtttagaaagcttaagtatgctcagaatacgaattgaccaagttttttaaacaagctgagcaagggttctattgataacaaactttctaaccgtcagtaatcgattatatacgctcctgtaatcgattattttgctcatgtaattgattgtttcaagattgtaatcgattaaactgttcaacaaacttctagatatgagcaacgaacaaaataatcgattattctgtcttgtaatcgattaagacaggaagcttcataacttgaaatacactatgtaatcgattacggattctggtaatcgattaaactaggaagctacataaattattttgaactatgtaatcgattacttcatttggtaatcgattaaaccaggagaacatgttaagtacaggcatataatgtaatcgattactaaccttggtaatcgattaagataggaaggtgatattttctgtttagcctatgtaattgattacagcctgttggtaatcgattaagttgttcatcaagacagttttaaaaatgaactaaggtaaaataatcgattaatccgatacgtaatcgattacattgttcttgaaaagttttccagaaagcactaagaacaaaataatcgattcttatcttaatgtaatcgattaaaccagtagtaaaccttatttttccaaaaactcttgatttaattcaaaaccttaaacaatttatcaaagccttgtaaattctattactcaaacttattgccttaatgaatgatatgaatgcagtgcacttggatcaccagaaatgcttcttccttttacatttaatcacaaattaatctttcaaggcttcaaggcatgttgaaagttcaaaaacttattcttgaatcaatattcgcttatgcttcaagcagctccccctgaattcaaaaaactgaacttaagtattattaggagaattataataaatacactgtctaatcagactaatgtgtaaaaaatgcatttgtgtcagccatttgtttgtggatctattgttgtttaatttgagtcatttgtttgaaataaaattaagagtaacttcttaaacttattcttagagcaaatacaactccttgtacatatacatatatatatatatatatatatatatatatatataaagatagagaagggatcaagttactttaagagtaactttaaaagaattactctttatcctaatcagtgatttttttgaaatatattgattaaaattagcaagctaatgaagagttactctacacacacacataaagatagagaagggatcaagttactttaagagtaactttaaaggaattactcttcatcctaatcagtgatttttttttgaaatttaatgattaaaaatagttagctaattaagagttactctacacagacacatgcatgcatgcacgcaagcaagcacgcacacacgcacgtatacacacacatgcacacacacacgcacgcatgcacacacacacacacgcgcgcacacacacacatgcacgcacacacccacacccacacccacacacacacacgctaagagtgtacgttagcaaactacaccattatgtattttaagatattctctagttatagtttgctaacatactcatactaaaaaacaagcgtgtctatgtgataagcgatgccgtatcgcttcaaaacaattaaactacgctaatcctatagtacaggattaacctaggtcaactcaaagacactatcaatatggttccaacttcaattcactaataaaaaataggggatttatgtcaaacagtttgcatgcaataagtaaaaattgtagaaaacgtataaactaatgcagattgataagaggtaatgtaaaacatattaaatagcatcaatccaattcaccaaaccaagcaatggtagttatcatagttctcagataatgattctgttatgaaagttcattcaatttcattagaagcagttcaattgaattaactcctaaattaattgaaatcacaaacctaggatgaaatatcatccaactaatctatgattaaaattcaaaattaggaaatgaatccataacctaattcgctttcaatcctaaacacattcataatcatgaaaattgaatagaggattgaagaagaaagtgaacattcacacagaatttgaaataccaaaccagaactcaaattctccttgcttgggctggatccttggattgattgtttgtttagcctcctatgatcatcatcaatgaaggccccatgaaattggtgcacaaaaatggaagaacagaaaacgaaaatgaagaatagtaaagaacaatgaagaacagttgagagaaaataagagaaagggttttaatttaaaaacttaaaaaggaaatgtaaattctgtttttgctaaaatgtagtgtaatgttcactttcttcttcaatcctctattcaattttcatgattatgaatgtgtttatgattgaaagcggattaggttatggattcatttcctaattttgaattttaatcacagattagttggatgatatttcaattaggtttgtgatttcaattaatttaggagttaattcgattgaactgcttctaatgaaattgaatgaactttcataacagaatcattatctgagaactatgataattaccattgcttggtttggtgaattagatttgtgctctttaatctgttttacattaccttttatcaaataccccacacttaaacatttgcactcctgggcaaaactaagaggaattcaaactaaagtaaaccaaaaattaaaagaaagatatgaacaaggcacacacatttttgaatgaatcataacaatgcacaaaagtgagaaagatgaaagatggaagaatgatattaaggtaacaaacaatccatgaaaacatgatcacaaagtgcaaagtgaaaaagtagttaagttaaaattaagaatgcaccaaggtgatagaaatctctcaaaggacaacactcaacctcatctaatgtgtatggctttgtgtttacactcaaacaccacctgtaactagcacatccaaatattgacaagactctaattcattcaacttgaaatacacatgcatcaaaagatcaaaaggactttattagtttgtaatgaatggcttaggtaaagggtggataagaaaatgatatttaggctaaaactaagagaaaagagaggcaatggggagcaagccaacaagtaaaaagagagttagaaataaagaaacaaaactaaaaggaatttacaaggatgaaaatggaccacaacaacttttattgcaattttttttctttttctttgcttgaacttctttttcgttgcttatacacaatttttcttttttctttgaacgttttctatttacacacacttgcttgaaacccactcccaaaacaattccaaagtcccttttctccctaaagctaggataacatggttttcgatttttttttttagtttgcaataagctatacaagaaagaaaaggctaaaggctcaaaaagggtgacaatggatatcaatacaaggataggtttatttgggtagtggctaaaagaaagaagggctaaatcatctcaatcaaagcaagtgcaacaaggaatgtcaaaagaggcaaggcaaaacatagaataatctagcacaagggtgaaatcacacatgaaagaacatatccacaaaggaccacaaactcacaaggcataattctatcacacatgatctatcttaaattctatttctcgagcctacttatcacttcagcaattgcaaccataattcacatcaagcatgaaacttctcaatccaaccaaaatttttacatttctcagaatttacacaagttagaaatcctatgaaaaacatgaaaaagtgcctaaattctatatttttttattttctgaatgtaaaaacagaataacaaaaacagacaaaaaacagaaacaacaaaaatagacagaaaacagaaacagaaacagataacagaaaacagaaaaaagactgaaaaattaagacagacaaacagaacacagacagacaaataaaaaacagacacagataaacagaaaacagaactagataaatgtaaacagaaaactgaacgcagacaaataaaatagaaaaaagacagaaaactaaaatagagaaaacagaagaaaatagtaaacagaaaacatacaaaaatagaaacgtatacaaaaaacagaaaacaaattttgtaatccttcactccacacttgaaatgtacattgtcctcaatgtaagcatgcaaagaaatgcaaacaaagagacaacaaataaaagaagggaaaaggaaactccctaaatgttattcaagatgcatcatcacacaaaattgacaagaccaaagagatgtccgccacaagctcctcctccacttgagagctctcatgaaatactttgagttggtgaccattgaccttgaagactttgctggtaacttcatttttaatctcaactgcaccatggggaaaaacattagtaataataaaaggtccatcacatctagatcgaagtttaccggaaataagcttaaagcgagagttaaacaagagcactttttggccactatggaactcttttctaagaatcctagagtcatgaaattgcctcactttctcatattcttctaagcggatctcttcaagttcttgcaattgaagtttcctttccatacccgcttcatcaaatgccatgttacaactcttcaccgtccattaagcacagtgctcaatctccaccggaaggtggcatgacttaccaaaaccaccctatagggagacatccccaaaggtgtttggtaagcggtcctatgagcccacaaagcatcctcaagtagcttgctccaatccttcctgttgggttgcaccaccttagtttggggatgataagttgtagcaattgtatgcacaaccccatacttctgaagtaaggatgccaatgaccggttacagaaatggctcccctggtcactgataatggctctaggcagaccaaacctgcaaaaaatgttggatctcacaaaatccacaaaaactttaaaatcattagttctggtggctttagcttcaacccatgatggacgatttataaataacacgctcactatacggtaagtgcaccgatcgtttcaagtaataaaataggtaagtgagtatcgttctccacagggattggggtgaaattcacagtaattataattctaagtgattgaaaataaaacagaaagtaaagaagaattgtttggattaattggtgtttgaataaaaacagaaattaaataagtgcagtaaaataaatgaaagattaccaatggaagaaacaattgtggtcaggcacaatcccttttgttctctacctctttcacttgactgatttattagcttaagttacacaaataataaatctctcctagattcgtaaatcccagataactagcgattcaaccctttaatccgatcgagaaccctaagcctttagcgattctgtcaaactaagcatttagagaacatatcataagagtgtccgaattcttatgctcggagaataaatctttcctattttagttaacccctaattccttagtgaattaaccctttaacccgaatcaaagacccaattccttggtgaattctatcaagttaagaatgtaaaagactatattgtaagttctgcagccacgcatccctatccctaggtgatgaacaactgttattttactaaggtcagaaattagaaccccaacgtccccattgtgaatcctaaccctcaatacctaaatagaatggccagttctaaataagaattaacaataaagcatagagtaaaataaaacgataagaattctcattaaataccagtcaagttacagaggagttacatcagttcatggccttcccacaatacaaatttagcctgccataggcttcaagaaaccaaaagctgtcaaataagacattatgcagtgacctagccttgatccttgacctccaagggtttagaataatagagagaaggtgtagagaggtgataaaaggtttggagagtgtatattggatgatttcttcagtccccagaggcctctatttatagattggtttaattaaagtaacaaagcctattcctgtgctaaaattcaaaacatataaatctaaaacaggcaacagaatcatcatggcgcgatctgcgcgcgatcctgcgctaaccgcgcgggtttttcgaatccatggcgctgatcgcgcggatatccacgctaaccgcgtggatcattcgagctgaagagtttgtggcgctgatcgcgtggactttgcgcgatccgcgtgagttgttcgaatcagagctgcttccaggctttgtggcgcggattgtgcggcttctggcgcggatcgtgcggggcttcgatcaagtgacgctggtagcgtggacacggcgcgactggcgtggagtcttcgagcttggcaggttgatcttggcatttggcgcggatcgcgcgggagactcttgacttgcttttcttctttttttggctttaaactcctcttttggccctgaaatgcatactttggcaaataataagatataatcaaatataaataataaactaacttattctaacctaattcctaatgatttaattgaatttctaacctaaaactaacctaaaactacgatgtgtttgcaacacatcaaacaattcccagatttaatagttgttgtcctcagcaacagacagaactctaagataagagcaaggatcaatgatcaaactgaaccacaatttacaatcctagaatcatcatgctgagtataatcaattcatatcaaagcttctatggtactttcaaatctgtcaattagtgagagtaacttgagtgttcctcacagaaatgtgtttatgcactcatgcactcaagtgtatcaggctaatcaatccctcactcaacatagtcacagcactaccataagcttgaaaatattctcaacagatgcaagcataatttgatcaaaaggtcttttaggcttgtaacttggctgggctaagggtaggaaattctttggattagtagctaatatgaggctagatccagtccttaagtccaattttgttgtcttccatgttccttgtccattttcttcaaaacctggtactttattcaacaatctattttctgcagtaaataaaataaaacaactaactttctttttgattttcttttcttttcttttctttcaaaatacaacaactttcagactttcagctaataatctcaagcttattatttttcaactggcctgtgcttatttattctttgttctttcataccaattgagttcaacttgtttcccttcatgccttgatggacaattccctgttttctgctgttatggactcaatttataccttttctagcctcagagaggttagtcaatggatatggctctgatttgggtaatttgaaatgaaaagtttaagctcaaataaggtacaagtggaaaaataattgaaggtaagtcaattttggccctggttttcagaagaagaaattgccttaatcatgtcaagtcacacctgcatccagagaaacaattcaagttctagaatactatgaaaatggagtctctcagaaaaaagaataattactgtttggctcaaaatctcacaggtgctaaactcaagtcaatcactgctgacttcatttcaagcaacatttcaacttcaacatgcatatcacataccaacaatcacaattccattcatgtgtcatgcaattcatgttatgtttcatttcacacaagctttcatcagagaaatcctacctattactgtgtccattcacattttagtctgaaaaatctgatgtgctgccaacctttattgaaataatcaactgaaaatttaaaactaataactaaaacaaaaatttttctgttggacatcctttgtttcttgaatgtgattcagcaaataatgcatatgcacccattcccagatttagaaaattgctgtcctcagcaataagtgaaaaggattatgtgctgttaaatactcaatcatgtatgcattatttgagaatcacaactagaatgaacattaatccaaacagactttatttaaaacagctaaccaactaaatagctaaactaaaagcatactgaaaattaaaaataaaacagtaaaattaaaacaaaataaatggtcctgtcattgtcattttgctgcaggatgcaacagcactttgctgacttgtctttcttactctcctcaccctgcagtgcagaaaaattccaaactatacctgatgcagtcggatgaattcccagatttaatccttgcattgcggttcagaacagcaaccaaatagtgtaactgtgccttagtgaatgacatgcagaaataatagcacagtttttaacacagcaagtatgtgtataggcccctgggaaatcaatctgctcagaattttgcagtgttcttatgattcccagatttagtttattacatagtttcacatcaccagctgtttgttattcacttggggtcacaaattgtaatgttgtcactcagttatacataaaaccccaaaacaggtctcagacactgcaatttcagctcaaatttgaaagccaagctataaatattagagagtacttagcattcagcaaggcttaccactgtggattcccagatttaaattcaggcatgtcacaaaatgatacaataagatcaagaatcacaaaaattcatcatcctccatggatatgcatagcaaacaattcccagattgaaggtcttgtctatgtttgaatttagttggttcaaagttggcagggacaattaagtatgaatttaatgtcaatgtaattctttccaactgagttcaattcaagtttacactactaccaaattttattgccctatccagttgaacactttttagccatctgatgcaactcaattattaactagtgatgtctcaagcattttgtgttcaaaatagattcaacgagtcaagcaaatgcaaggcctaatgcatttaattattctcaaaagcacttatagaattaatactaccaatttctattgaaaccattcattcacatcaaggtaaccatgattatggcccaacatgaaaaatcaataaaaaccatagccacaatcaaatctgcatattatgctcaagcacttatcaaataccttgtgcacaccattcaggcaatttggttatccattcaaccattagttcaaagcatgatttatgggaacagagtcatatataggtatctaagatcaaatcaatccatcaatatgttaaaaggcttgatgcttatgtcaaccaattccaactttcattcaggcatttcatcaaacatgtagtgggcatcaaatcaattcaattcattaagcctattttgaacctatcaatatcccaaatgacagaatcaagagcaacacataaagcaattcgcacaagcaaatgggtttctaccctaaggtttcccaaattgtcatcagaagtgaatgagaagattttaaacatgggacattggttttctgcagttcatagctataccattatatgttacatgacattttaagggttggaaagttaccttatcgccagccattacacaatttagttccctagatgcagggcaaattgaaatcacaaagagaatggaagtggagaccatacgaggtatagagaatgagatagagagagaaaattgcacttggggtaggcttttaagagtgggagtgggggtggagagagagtttaaaaaaataaaatagtttccgcgattctgcgcggatcgcgcgacatgtggcgcggatagcgccatggtgtactggaagggtgtatgattcgatttctccgcgtgaatcgcgcgggatatcacgcgatccgcatgagttagcattgaaaggtcattttgactcgaaagcatggcgtggttcgcgcgtggttccacgcgattagcgtgggatctcaaattccaggcttttgtttcgaaataatggcactattcgtgccagtactcacgctagtagcgtgaaatgatgcagaagacaggtctggtttcgaaccatccgcgctactcgcacgagattcacgcgatccgcgtgaactagccggggctttggcgcgagtcgcgccgctcctggcgcgaatagcgccatgctttttgggcagcttcttctgctctttatcttgcttttaattttgttgatctaaataacttgctacctaaattgaaacatttataatgatggacctaactatcaaagtctaattactaatgcatgcacctaagtactactatggagtatgcagaacaaaaattgcagaataataaatctactgctagcaaacaaaatttaaattaccatgtatatacataaaaagattgctcgtttaacgtcttcagctagacgtatcctgcggtttaatcattagtggattgaagtggaataggagctgtggttccatccacttggccttcagaataaggtttcagctggcatttgttaactttaaaaggtttgtccttgtttaaagaagtgagttctattattccgtaagagcaaatcttttgcaccaagaacggaccagaccaaaagaattctgacttacctggaaacttcatgcgatactttgataacattactttttgtcctggctcaatttctttgttacgccacttcttgatcttcttctgacaggttctagcatttttgtttgcagccacatgtgttttgcttgcagtttgctgctcctttagtgcagcatccagcttcttggcacatttcttttcagctgttttcacagcctctgttgcaacctctttcagtttaatctttgatgttccagctggattatcatcttcctttttctgcagcaattccagaacagcttcaatggtttctggtgtgggtttttggtctgcaacattcaattctgcagcaaattctgctgctgcactttcagcttctgctgaattttcttctgcagtattttctgctgcagtttctgcattttctgcatctattttacctgcacaattcatgttatccagcaaatctagcctagagcagttatgtatgtcaaatgaatcattcacagtattaaaaacattaaaaacaacagactcattatccatcctaagctctaactttccttgttctacatcaatcaaggccctagcagttgctaaaaaggatctccctaacagcagagggatttcactttccccttccatgtccaacacaataaagtctgcagggaaaatgaatttgtctacctttaccaaaacatcctcaatcacccctgagggcttccttaaagatctgtcagctaattgcaaggatactctagtaggttttaattcagttatgcctagggacttacacattgataatgcaatgagatttatactagcccctaagtcacagagtgctctccctacatttatatttcctatggctatagggatattaaaacttcagggtctttcaatttctttggaagctttcttaaaataatggcactgcactcctcagtgagtgctatggtttcacagtcctttaacttatgtttcttagacagaagttccttcatgaattttgcataattaggcatattggccaatgcctcagcaaatggaatatttatatgtaactttttaaacatatctaagaacctggcaaactgctgctgctggatttgttgcttggtctgcactaggtatgggggtttctcaaagcaagagaaatcccactgcttctttggacgtgcagtatttttctccttcttctctttttctgcaaatttttctttttctggtttggcagctttttctgtttctgcttcagctgcataatttttcttctcagcttcttcaggtgcagtgagcatcttaccactcctggtggtgatagcattgacatgttcccttggatttgtcactgtgtcactggggaactgtccttgtggcctttcagaaatttgctttgccaattgaccaatttgaatttcaagattcctgatggaggcatcttgatttctgtggtgagctctggtctcagctatgaattctgttgttgtttgtgacagctgcattactaccttctcaagttcagaaatattagtggttggaatggaaggaggctgcagataattattggacttatagtctaatcctcctccttgaatgttcctctggtagttgtttcctgcagcaaaattgttgtttctctgatatggctgctgctgtctttgatcattccaaataccattaacttgcatagggtcagctccaacaagaataggacaaacattagagtcatgctcaccttggcagtattcacaattgacctgtggcttactggctaaaacttgggctacagagacttgtaatctatcaattttctcggtcaatttggctagttgttgtgccaaaattttctgctctgcaagcattgcatcattagtggatagctgaattggttctctctttggctgatgtgttatgctttcattttcattccgggccaaggaattgataagcttatatgtctgagctgctgtcttagaccttatagtaccccctgctgcaacattaacgatcatacgagtgtcaggagtcataccattaaagaaaatacgtacctgcttacctacaggcatatcatattgtggacacctcctgatcaactcttggaatctattccaagcagcacatagggattctcttccattctgagtaaaattggtgatttcattcaccaaccggttatatttatccatggaaaagtattcagcaaaaaatcttgagactaagtcctcccaagttgagatgctattggatgtttgtcggttcagccatctcaatgcatttcccttaacagcaaaagggaataggcttaatctcactgcatcgtctgggaccccttggtgtctgatagtgtcacagattctgagaaatctgtcaatgaagtcatgtgggtcttcaaaatcctctcctccaaactgactgcgttccaccaatgctattaatgaagggtttatatcaaagtggctagcttgtattggtggcctcacaatgctggagttgggtctggtgaacataggagccagaatatcctccataagttcatcttccggtcttggctgattatttctttgttcagccatctcttcttcggactctaattcagggattgaatcaaagtcaaaattctcagcttctcttcttcttctttgtctagctagcctgcctcggattgttctttcaatttccggatcaaactgcaaatcctcagaactaactgaacctcgcataaaacttagagaagcgattagtaacaaaaattccaatcacaaagattaaaattattgaaaaaaatccgttaaccaatccctggcaacggtgcaaaaaacttgacggacgatttataaataacacgctcactatacggcaagtgcaccgatcgtttcaagtaataaaataggtaagtgagtatcgttctccacagggattggggtgaaattcacagtaattataattctaagtgattgaaaataaaacagaaaataaagaagaattgtttggattaattggtgtttgaataaaaacagaaattaaataagtgcagtaaaataaatgaaagattaccaatggaagaaacaattgtggtcaggcacaatcccttttgttctctacctctttcacttgactgatttattagcttaagttacacaaataataaatctctcctagattcgtaaatcccagataactagcgattcaaccctttaatccgatcgagaaccctaagcctttagcgattctgtcaaactaagcatttagagaacatatcataagagtgtccgaattcttatgctcggagaataaatctttcctattttagttaacccctaattccttagtgaattaaccctttaacccgaatcaaagacccaattccttggtgaattctatcaagttaagaatgtaaaagactatattgtaagttctgcagccacgcatccctatccctaggtgatgaacaactgttattttactaaggtcagaaattagaaccccaacgtccccattgtgaatcctaaccctcaatacctaaatagaatggccagttctaaataagaattaacaataaagcacagagtaaaataaaacgataagaattctcattaaataccagtcaagttacagaggagttacatcagttcatggccttcccacaatacaaatttagcctaccataggcttcaagaaaccaaaagctatcaaataagacattatgcagtgacctagccttgatccttgacctccaagggtttagaataatagagagaaggtgtagagaggtgataaaaggtttggagaatgtatattggatgatttcttcagtccccagaggcctctatttatagattggtttaattaaagtaacaaagcctattcctgtgctaaaattcgaaacatataaatctaaaacaggcaacagaatcatcatggcgcgatctgcgcgcgatcccgcgctaaccgcgcgggtctttcgaatccatggcgctgatcgcgcggatatccacgctaaccgcgtggatcattcgagctgaatagcctactactgagtttgtggcactgatcgcgtggacttcgcgcgatccgcgtgagttgtttgaatcagagctgcttccaggctttttggcgcggatcgcgcggagcttggcgcggatcgcgcgggagactcttgacttgcttttcttctttttctggctttaaactcctcttttggccctgaaatgcatactttggcaaataataagatataatcaagtataaataataaactaacttattctaacctaattcctaatgatttaattgaatttctaacctaaaactaacctaaaactacgatgtgtttgcaacacatcaacccatctagaaatataatcaacagaagcaaaatatatgaaaaaccatgagaaataggaaatggacccataaaatcaataccccacacataaaaaatctcacaaaaaataataggctgctgaggcatctcatgtgtatgtgtaatggttccttttgctctctgacgctgctcaaaagtggtggtaaaatgatgaacatctctaaacaaggtgggccaaaagaacccacagtctaataccctcctagctgtccgttgaggaccaaaattacctccggtaggtgtgccatgaaaaaactgaagaatagattgaatctcatgatcgaacacacaccttcggatcacttggtcactaccaaacctccacaaataaggatcatcccacacataatatttagcatcactcttaagtttatctatttgggacctagatgcatgaaggggaacaacagattcaacaatgaaattcacaatatcagcaaaccaaggtgtgacatgcgatgaatgcaaatgcatcaaatgttcatcaagaaaattatcacaaataggaaaggacacaagaggtcccttaaccctactcaaatgatcagcaaccaagttttctgcaccactcctatccttaatctcaatgtcaaactcctgaagaagaagcatccacttgatcaatctaggtttagcatcaggcttcttcaacaggcacttcaaagctgcatggtcagtaaagacagtgatatggaagcaaagcaaataagatctgaatttatctaaagcaaaaacaatagccaaaagctccttcccaatggtggtgtagttaacttgggctgcatccaaagtgcgtgaagcataagcaatgacatgggagagtttatcaactttctgtgacaacacagccccaagtgcataattagaggcatcacacatgagctcaaagggaatgatacaatcctaaaaccaaggcaagtgaaggaagacttggaattacacatggaggcacttccttgggtgattaaaggaccaatgacaagggatagggttcaaacactccaagatcacatacaatctaacttgtatctcttggagaaccatgaagaaggctacaaaatgttgagcttatctgttgtaatcgattaccagtagcctgtaatcgattaaatacacttgtataaatgttagatttgtaaatagttctgtgataatcgattacaagtcctatgtaatcgattatatgatcatcagtagtgtagtttttgaacttagctttgctgtaatcgattattccatcatgtaattgattacatagaagtgtgagttcctgtgataatcgattattctgatgtgtaatcgattacccggttttgggagctcctgtgataatcgatcatttggtgagataatcaattattttgttcatgctcagtttccaggactgatatgagcaatgtaatcgattaccaagagttagtaatcgattatttgattcaaaataatcgattaccattcgaaataattgattattatcgtttttgctgcagaggcgccatttttagtttttaaacagctgtttggattgcttcccttggaagctacatttgtatttcatttaagacgcatttacattccattagcttatagtttcgtggcctatataagctacatttcaacagattgtaaggacttttggttaaatgaaattagaatgcactttgtgtgtgtgagaggttgagagttattctcccttgttcttagtgaagaacttgttgtttcttattaatagcttctgagctattgtggtgattattgcaagacttattggaattcctattccatggtgtcaatccaaatccatttctgatcttcttccattgttccaattcctaaatcacaaaacctaaaaagctgtcaaaaacagagcacttcatactctgttttactttcaattgaagaattgattccattgcaaggaagatcggggcaaacaggacttgaatcagtccaggagtccatcagggaagctcccaatctggtggctgcatgatgggagaggtagtaagcttcttcctcaatccctcaaatgcctctttgcaaggctggtcaaacataaagtctacgtccttttggagaagcttggacaatggcaatgcaatcttactaaaatcctgaatgaatctcctataaaaacccacatgtccaagaaaagaatgcacttcccgcacagaagtggggtaaggcaaagaagtaatcacatcaatcttggccttatcaacctcaagacctctactagagaccaaatgccctaagactataccctcatgcaccataaaatggcatttctcaaagttaagaacaacgttagtcctaatacatcagtcaagcactctagagagactatccaaacatgcatcaaaagaggaagcataaacagtgaaatcatccataaacacctccatgaaacctctaataaatcagaaaagatactcaccatgcacctttggaaggtgccaggtgcattgcataggccaaaaggcattcgggtgtaggcaaatgtgccaaatggacaggtgaatgtggtcttgtgttgatcctctggtgcaatatgaatttgcatgtaaccgaaaaaaccatcaagaaagcaataatgaagggaagagggaaatggttcttgcgagtgacctggttgagtctcctgtagtcaatgtaaactcgccaactgttggccactctagtcgggatcaactcattatcatggttcttcacaaccgtgatacccgacttcttagggaccacttggacaggtgaaacccaagtgctttctgagatgggatagatgatccctgtagctagtaacttcatcacttccttctttacaacatcaagaatagtgggattgagcctcttctacggttgcctcactagcctagaatcatcctccaagagtatccgatgcatgcaaatggaaggattgattccatggaggtcaataagtgtccatccaatggcctttttgtggcctctcaaaacgttcagtaacttttctttatgctcaagtgataggctgctagatatgatgactggaagcttttgagcattatctaaatatgcatatttgaggtggctgaatggtggaaggcaaggaaaagttggtggctgaaggaagggaaatatgagaatcaacatttgtacgtgaaacacaatcagaatcaagtgcggaggaaatctccgcacaaatactacagaaaacgtagaatcatcataggcacaggtacaaccaagatcaaaatcagaaaaataaaaaaattcatcaaaaagtaaatcaaaaatatctacactatctacttcaacatcaatgatatcaacaagaaaaatggaatgctcctttacaggatgtcttatggcatcaaaaaggttaaactggacaatctcatcaccgaactccatggaaagagttccggcatacacatcaattttcgtccttgctgtcatcaagaatggtctccctaggatcattgtggaaccatggctggaagactcattctccatatccaaaatgtaaaaatctgttggaatgatcaaattattgactcgcaccaacacatcttcaataagtccaagtggaagcgcaacactcttgttgactaagtgaatgacaacaccagtgggtttcaaatcaccaagatgtaatgatctgtaaactgatgtgggcatgacattaatggaaactccaaggtcacacattgcatctgcaaaaatataatctccaatggtgcaagggacagtgaaagtgccaggatccttgcacttctgtggcaaggtggatagtggaatggcatcaacaattttgccctgtatcagtgcggaaacatttctgcccatcttcacttgctcatttccctttagcttcctcttgtgggtgcacaaatccttcaagaactttgcatattttgaaatctgtttgatggcatctaagaggggaatgttgacttccaccctcctaaaagtctcaagcagatcaaaatcaaggtcaaccactttatttgcagaaatggatctagaaggaaaaggtaagttttggtgtagaatctgttttggcaccatcattaatttttttaccagcaccagcatcaattttagcaccagcatctggaagctccgtgccactcctcaaggtaatagcactcacattcttcggattaataattggttgtgctggaatgttacaagaaccttgctattgcatctggttgacagttgtagctaactgtccaatctaagtctgcaggtcttggatggtggcactgacattttgttgaaactggatgttgctggttgccatttgcttcatcaaatcctccaaggaaggtcaagaactggtctgcataggttgtgcaggttgctagaattgtggctgttgtctgaactgaggaggctggtatttgctggaggaaggttgatatggctactgctgttgaggtctgaatggctgttgttgtgcctgctgttggtgttgcggactaggaccatacctcaaattcggatgatctctccaaccaggattataagtgttagagtaaggattatactattgttgaggtttgaatggctgtccaggttgtatggtagaaacttcagcagcttgttttgtttcttggagagtgggacaagaatctgttggatgaccaggtgcacaacagataccacacagccttgactgattgactgccatcacattctgctgttgaccaatagcaagctgtctcacaagggatgtcaactctgtcaatttattctccaacctctggttatcagcaaccatggaaacataaacttcatttgcagtagccttacttgttgcaacacctctagtaccaaattgttgataattggctgccatgttcgaaatcaactgccttgtagcatgaggagtcttgtccatcaaacgcatccactggctgcatctatcatactcctgtccatcaacatcaagccttcataaaagtactggatcaataattgctcactgatttgatggtgaggacaggtagcacacaatttgttgaatctctcccagtactgatacaaagtctctccaagcagctgccttataccacaaatttctttccggatgaatgctattctggaggcagggaacaatttctccaagaatcttctcttcatgtctgtccaagtgttgataggatctggttgaaggtacaaccagtccttagcaacaccatccagagagaaaggaaatgccttcatcttgacataatcctcatgaatgtcatgtggtcgcatggtggaacacaccacatgaaactcctaaaggtgcttatatggatcttcaccagcaagaccatgaaactttggaagcaaatggatcagaccagatttgagctcataactaacctcagtctcatgatattgaatgcaccaaggttgataaacaacaccaggtgtagccaattccttaattgtattgtatcaacaaaattttcagaatcaagatgtgcagaatgagaactaaactcagaaacagaagactcaaaaaacactacactatcaaagtcatctagactactattattcctactcaatctatgaaatgtcctatctattttaggatcatatgaatgcaaatcacttagttgggacttagtcatgcacagttcagctcatcaacgacaacatcacagaaataacagacaattatcctaccagaaacactattcacaatatctgtcgaaatgaaacaaaaattggaaagctgcctcgaacaatttttaaaaaattcaaaaacaccacagtaaatgtctataaatcatgcttgatttttgtgaattttttgatgaattttaaaaatgatgaaaacacaaaataaattcaaaagtggtatggatcaatgaatttggcaatttggacccccttcaccatgttcatccttcacagggtcaccttgatgtataaattttctccacattcaggtaaattttcagctcaatctgagacaatttgttgtgaaataaccagaatgcccctgtgagaaaactgttaaaactcctacttagaggccgaatttgccaattttaacccacaccaaatcccaaaggggttaaatttgcttataatggggataaacttcggacatcaagtttcagaatcaaaatccacaggaccaaaaatttatggacagcaaattgcaccacctacaacacaactacactacactaatcctttccatactactcctctattttttaccgttcactctgtttttttttacagcactacatccacttcatcatccacacttcacaacgaacaagagcaacaatgcaattatgtaacaaagtgcaattgtgcaacagaatgtcaatatgcagtgaatgaatgcaaatgctttttttcttttttttttaatctaattatgagtgaattaaagctagcacacaatgaactgtgtccccgacaacaactccagttttgataagcgatgtcgtatcgcttcaaaacaattaaaatacgctaattctgtagcacaggattaacctaggtcgactcagagacactatcaatatggttccaacttcaattcactaataaacaataggggatttttgtcaaacagtttgcatgcgataagtaaaaattgcagaaaatgtataaactaatgcgaattgataagaggtaatgtaaaatagattaaagagcatcaatccaattcaccaaaccaagcaatggcaattatcatagttctcagataatgattctgttatgaaagttcattcaatttcattagaagcagttcaattgaattcactcctaaattaattgaaatcacaaacctaattgaaatatcatccaactaatcagtgattaaaattcgaaattaggaactgaatccataacctaatttgctttcaatcctaaacacattcataatcatgaaaattgaatagaggattgaagaagaaagtgaacattcacacataatttgaaataccaaaccagaactcaaattctccttgcttaggctggatccttggattgattgtttgtttagcctcccatgataatcatcaatgaaagccccacgaaattggtgcacaaaaatggaagaacaaaaaatgaaaatgaagaacagtgaagaacaatgaagaacagttgagagaaaataagagaaagggttttaattctgaaaacttaaaacggaaatgtaaattctgtttttgctaaaatgtagtgtaatgttcactaactaatttcactagcatatagtgattaagtcagaaggaaagaatggaccatgaataggcccatctattctaattaattatgctatttacaccaataaaaatccaactcgcagcccaaaattcaagtgcagtgattctggcttaaaagcctaaaatgaccctccaaatgatagaattggcctaggcttatctatgataaaattgtagatcttctctttatctttccaaggactacttatatgctccattcggagttctgtagagctctttatgtcctgtacaagaaagataggtcaagtgagcataaaatcagaaaataagcaacaattagcaattaagcccacttgcttgcctaagacaaaaactgaattagaatgagaaaataaaagtccaagagaggtcaaataagctaagaagaatagaaaaatatttaactaaaaatgctcaatcactatgttagcaaaatccacacacacacacacacacacacacacacacacatatatatatatatatatgttcctgcctaaaaatgaccagatactttatcttcttgccatgtccttctatttggggtgtcctttcctagtattcagcgaaacaattctccgaagggtggggtacctgtaaaagacactttgaccctgaagttaaatctcgacataggaagaataatgagtgtagtaaatgagagtggatataataatgtgtgttaacttgagaatttaaacctttatataaacatatttatgggcctcaaggtccataggccttacttctttattaatgggatgcaatatgagattacctgatattatgataatataagctaaattatttaagcttcatgggctggtggtcgagagggtactaggccgtgcccaaaggggtattaggttatatagctaagagggtcctaggtggtggccaaagggattctaggtcatgtttaagccaactatggtttcttcctacctaagagggttggaggcgttttggtattcgacctagtcgaatactcgaggtttcacctttgtcaaatatgatccaaaatattcagatattcggcctagttgagtacctgggttctttctttactgaggggtactaggccatgatcgagatggtttggccatctttggtggaagttggctgaaaaagtgttaggctatcctttgctcgagacaggtggtcgaaaggttctctatgttgaattgtctgagctatactccaagccaaactgattggacacaatgatcgaggtcaagtgtagctactaaaggctgagtggttgagaagttaattgagactaagtggtcgaatagccaacaagtactgaggttctgtttaatggaggtcagctgatcgaagttacttaacaccaagtgatcaacaagataagaagatagtcgaggttgagtttaccaagacaattgtttgaggtcgaatggttggtaagttacttaagattgagtctcctttaagcattcattatctgtacttggatggctttaaaggagaaatgtgatcatttaaacatgcatctcaatataaaactatcaggttggggaatagtataaaaacttgaactatacccaaaacctcatcttttcctttttgttttctagttcgtaatgcttttacccacttatatcatgcatatgagcaagtagtatgtgatattacaacaaaccagaaaccaacttttgagaagttgagcaagacactctatgccattgcttgtgtctgacctccattgcgaaaggcaactttagtgacaagcatttatcgagatgaagatctgagagcatctttagtgatacaatcaattttgaattcttggattattttttgtgagtctcatggtgtcacataggatgcaattttttttctttttttgctctagtggtagatgccactttgagttcttgaatcactttcgtaggtcccataacgaacttcaattaaaaatattttatgaattagtcaggaagggacattaaaattattttattttaaaaatgatggttattgagagttcttttcctagaacgcaaccataatgctggagaacttgaaaacatgtttagtgatagatatagtgaagaagagttcttgagctcaaaaatccttattaaagatgctctgacattgggtctatgtgtaagcatgtgagtgttgaggaacttttgcggtaataattttgggttgtgccacatgcgggtgtgagttcggtttgagttttgatgttacaatcagtgtcggaaaagactgttgaagtagaatatgaaatggccagaataatagcgttcatctggccatgtcaacagcactacaaagctccaagattgaacacccaatatttagttgttgttgccttcatttgaagaccaaggtagaagccacaacttaacccttataattatgcttttgtaatttgacatggatcaaggtactcaagtgcactcggccattcggctgtccatgcatatatccaagacctgatattggaacttaaataacacctctcagtattcaattactaggtcctccgaatattcctatcctctcctttttggtatgactagaaactagatgttcttggatgttcgacactccaaaagttagaatccttgtatgtaccctcggtcatttgttaatccggatactctcggtagaaaatattgtcgtatctatctgacttctaacaatagaaatgatattggcttgtatgtgttgggaaggctatccccgtaactccttggttgtgtaaggtgacggtgggttctcgttgaatatcgtaacatgcatttttttataaagcttcaggtgagtatacattgtggtaaataattcgacttgagagccacactatgcttgtgcagttggaaggacttggatcttatatgtgtcttcccatttggaatggtaaaacctttttcaactctagccgaaatacctctctgataagttactttcttatcgtgttggaaaatgatgcatatggcatattgtttgcatgttagtataggcctccagcatgttcaagtgatcaagtttatatatgcctacgataatgctgaaggcttcaaaataaaattagaaataaagattaatagagtccaaagactgtagcgaaaatcgaagtgacaatgtgtgctaataaattattgaatctcccctgtcggcaagggaaggcgtcgcagctaggcagcctttgcgataggtgtcatgtccgggtcttgccactgcctccaagtagaagttcttacaaccaaagtcattaagaaattgagtaaacatataaaacaaatgttatgatggaggtccattgcaagttcaaggccaagaaggagaacttgaagaacttcctttggttagctttagagaacccatgataagagctagaactcaagcctttcaacagcacatcaaagttaacttgcaccttttagataagtatgaagatgcaaaccaactcaaaaagaacaagggctggattttgtactctcaagttgaatttaattccagcaccttttagtgacaatagtagtggcaataaatatgcctttagtggaaataaaaaggcctttagtggaaattgtgtaaataagtgtaggtgcatttgcatgtaatatttttagcacctatgtgagcttgtaaaatgcacatggatgaaattgacacgtggttgagtcatcatatgagaagcttgcaccacaaccttcattagcttgcacctcaagcttcattttatttgccatttgacttgcatttagcttacattttcgtggctatataaggctagctcaaacatattgtacacatttttggttaaatcattaagaaagctgaattttcttgttagagcttctctcttgttcttgtgcaagaacttcttggatcttatcaagggcttctcaatgctattatggcgattcttcctagactcattaaagagcttctccatggcttcatccatcttcaatccttgtctcaatccatcttccattgttgaattctttggagcaacttcacgccatttttgcttcacatcttgagtgagaacttgagttcttgaagagatcttaaagagtgagtttcattgcaaggtagattggagaaatcaatgtctaatgaggttagacatacatcatgtggtatctagagcctaatccttgtgaaattcttcttcaatttcaatttctagatctactccaaaggtaatccaaaaatcacaaaaaatcttagatctacttctagttttcttaatttttctgtaaagtcttggtggattaagtcttgtctgtgttcctacacctttcctagtgattagtttcaagtttttgaaattcttgttcatcttatgttcttcatgttcttccattttattgataattttctagttttgattcttgtcaacttgtgttactagttgtttgttgttagacattgggggagctagagaggatcaagaagctgaggttcttacacatggaagtgtttaggcttttacatgcctattgaattgaatgacatatgtaatctttatatatctaagtgttccatcctatgatccattgcattgcataaacatcattcatagttttgcattcatgttttcataaaagcataagttttgttaagaagtttttctgaaacataaagttttcatgaatggatataaagccaagtgttctatgtttcaagttttggaaaaatattttatcactggtttaatagattaccaacaagtggtaatctattacttgagataagagaacaattttaatcgattacgagattgttgtaatcgattaaacagtacaaaatcacatattgacttcctgtgataatagattacaacaagatggtaatcgattacttggaaattatcttgtaaaagtcttcctgtgataatcgattactttgtgatttaatcgattacattgttcataaatcttttccagaaagctcaagaacactttaatcgattacataagtgatttaatcgattacttggaaaatattttaaataaggcttcatgtgataatcgattacattgcgatttaatcgattactttgttcataagtcttttccagaaagctcaagaacactttaatcaattacataagtggtttaatcgattgctgacaattataacagttttgtctataaatagaatcaatttgttttaactgaaaacaatgaaaatattaaagatttgcataccctttctgaagagagaaaatatactacaagctactgagtgtttgtcccacaaatccttcatcttcatgaaactttgaaaggatttctttttgggcaactttcaaaagaagaacttggagagaatgttctgagattgttctctttcaaccttgattcaagtttggtaaacatttgcattcatctgtagtggatcatcaggttgtttctctacatactactttggttacaattcttttagaatttcagttttgtgtaactagtgcaataggtttcttgaagcttttctagaatatgtttttctagagggaagagtagagaaaaggtttctctatgtcttgatcacagagatgaaatatagggccttgatgcccgaaggcatgtgagaagaaaaacaaaaatttttcaaaatggaaacacacataccattcaagaatcattctttagatcatagatgttaccttgtttatattcaaaaattgatgatcaagaataggcttgaaggtacaagccctctaatgatgatccacaccacttcttgtcaagactcaagaacacttcttgaatgccaccaacaaacaccaaaggacgcaagctaggcgcaccaatggagaggaagaaggttaggttttaaagtgttttacttatctaagagactcaccaatagatgatattggtggctgaattttcagccaaaactcacacaaaaggggcacgtgaaagtggaggaatttcgataggtttttctcaaaaactattttatcaagaactatgatcataagagtatatttatagaagagttttaggttagatttttaaccataaaattctgttcattaagcatctcacacgtgaagaaaagatagagttgttgtatttcaaaaattgccaacaacctcctatcttatcttcttaagaccaagtcaattacttggaatttattttgccaaatgataatcaaatatccagccgtatgataagcctctaatcagccctcaaacttcttcctaaaatctaggatatgatcatgataagatgctagttgaattcaaattcgaatctagctcttatcttctccttttgatatgaaactatctactatagttaattcatatttaaattcaaaatttaaattatcaaatttaaaatattagataattaatttaactatttaaattaattaataatgtcttggactatccaagcccattaactccattcatgtgcccctctctctttaagataactttctaaactctttcttgggccaacaaccattattaggcccaaaacctttaatgctataatgtcatgacaataaagtgttggtgtgtgacccattaggcccaacatagctactgacataaatgagtttgggcccaacaaggcctctacccatttaatgacaacacaaagcactagcaatgctttgttgccccagaactagttaggtaaatgacaagatcatcctattaaatctatttggtttccgtatgtatttcctttcgtctcggttaccttcccataaaacctagggtaaggaaatgtatcagtccttgcggtctagggtaagctttaatgcgaaacagggagtctccaattttactgactctaaaggcaaatcatctcatgatttcttctactatgcatagattcccgagtcccgtaaatgtcatcctaatttctccggtttacagataacctaatctctcacagagatttgacgaattccttcagctagtcaccctagacttgtgttctttcaggacatgcccaaaggtatacctatgtgtctccatgtttcaggcagacgaggtatacaatcaaagcatgtcttctagaatacagtctaggtgaaaacttctggtctaaggaaagacacacccaaataataagagactactctaatgatactatctgtgagatttcctcatagagtctctttgtgggtccgttcagtgcgagctatacccttataggtccacccatgactttagctaagacatctccatgtctgtagctcatgaggtctttaccttgtatctgcatacaagtagataagccgtgctagtcttacccgagatcactgatccccattttcagtgtctctagactaggaacttaaatttaggagtagacttctggtatccttgaatcctcatgatcgtgatcccatcactgatattcaagagatacctattctattccaagggttttttccagttactcatatattaaaaatgatatcgagataaaatatgaaacaagataaagagcgcttataatttattcatgacaatatgaaaagtacacgtacgtcctaatctaatgaaaagattgtctctaggacatccatatactaagaagagagtctaagggagttagatttcttgttcttaatctaggtctaattgagagtgattgtataagctcataagaaacaagattgctaatagtggaactctaactagttggttaggaaaagtagatgtagcttctctaggttgagaagtgaaccagtataaatctcggtgttgactacttctttatcttttcttgtagttattaattgtcatttgttggtaaatcttttcataatcaaaagaaacgttttggttgcattctttaaagactagtgtttgactgactgaaagtgttcttgatttgttttgtgaagtgatctttttaactctgattgtttaagaaattttaattggctaagaacaaccaattcacccccttttggttcttgtgtgttgttcatactattttcaattggtattgtaacgacccgcctcgtcgttacaacatcacaaactccagatcgtgcaatttcaattttaatatgaaatctccattaatttgattatgaaaatggtagtaaatttttttgcaataaaaccattattatacaaacgatacaattacgtaattgaatacacatgtatgcatatactgaaccagtacatatcatttacatatcaacacttaatttgattttacatatatttacacctggaatcttacatgaccaacaaaaaagaatcgaagaactaactaagaaagagttgattagtaaaacacaactctttccgaaaacgaattccaacatcatcacgtcggcttggcgactccaacaaaaagaatctccctccaaggtcacctactgctgctcatctgctcccatgaacgaaagttcgcgatcatcacaggtaccaaccacacggtacaacaaatgcaagggtgagtttattatagaaaaccaacaaacatcagatagcagcaattgggaagaaaacaacattacccaccacaatcattaacaaaaatccatgatttcaatacacactcaacaaaccaatcatccaatgcatttcacaactcaaacaatcatgcatagaatgtgcatatctatcagcatgcaatgtggtaccatctctggaaatagcctctcacaggaaaaatgattcaccgcctatcagggccaccctgtcgtgcactggccattcccccacccggtgatcagccagcgtcgcaagggaattccaaacttgatgaccccttagtacctgcgtctcagcccactgaaactcacaggtacgcgcgtgccttcattctatttccacacatacaaatgaggtatgaaacatgggcatcatcaatgcatgaccctgctaggaacaaatccttcctcgcaagggtaacccgtcatgcaccccccatgtacatacgtaacacaccaatgtgggctcaccaatgcattgaccgtggctaggaacaaatccatcctcgcaagggtaaccaaccggtcattgcatcccacgtgtacatacacaacctacaaccatgggcaccatcaatgtatgacctggctaggaacaaatccttcctcgcaagggtaacccgttatacacccccatgggtatccatgtatatccacacacaatgacatttttcacatcaacattatctctcatcaatgtcattatcaacctcaacatcatatcatctcaatatcatcatcatgcatatcaatattatctcatttcaacatcatcaaccatgtcaacattatctcatttgatcatcagcaattaaatcaatcacatctcaatttcaatatcatcaacgctatcacaagcaatcatatttcacatctatacataatacgtatgcctgagattcacattccccaggtcttcagacaatccaaatttcatacattcatagttcatcatatcacaagactgatatttttaggaaaattctaaattaaagaggaagactacaatatatgaaacacactcttatgcccatttaaaaatttaataaagaattaaataggaaaacatattataaaattttgggcagaatttcctgtgtaattaagacttttcctaaaaatccaatcattacaacgacaatattattcatagtttatccatcaacaagccaattcatcgcatcccattagttaaaaacatttttttttcttgaaaaccaacacacagcagggacaggcagttatcttcatagttggactccctggtccccaactatggtatcaaaactataactaataataaattccccttacctattgtaaggacccttattcttggcgccagaccccgcgcgacagcgcggggattcacttaagaaatgcttattttaagtgtggcgcgggtcgcgccagagttggcgctgatcgcgccatatgttttggttgtggcgcaaggggcgccagtgtggcgctgatagcgtcatactctcggcaagttcacgctaatagcgtggcaacggcgccaatggcgtggactggccgagaggttggcgcgggtagcaccaaggccgcgcggatcgcgccagaaagtgcctggagagccattttcatgcagcctgttcacgctaatagcgtgacttacggcgccaatagcgcgggaccaccgccattgtggcactgatcgcgccatatctggcgctgatcgcgcgggatcgcgggcaggccgagtatatttaaggataaacgcgaaaagggagaggaaaaaaagggtattttcttcttccctcagcccaaacttccattagagaccctctgagctttcctagacctgtatatactagcctaaacaccttcttgagacctataatcttgttagaaccgattagaaagctgaaatccttcatctgttacttgaaaaccatttgtgagtgaaaggttgagttctcaagtggaaaacctcagagaacttgagaataggcgagaactaaggcgggagacggacgtcagaacttgaggaagctgtcctgcggccttttgagtcgccactgaggtaagagactcaagtttctccggttaattttgaatttgagggtctctgtgaatagtgacccatatgagctggggctagaattagcccagggtcctgtagagaatattgttcagagttgagtagagatgaaggattagctttcagtttttgattctgatgactttggatttttggctctgtactgtctgtgtggctgtgtaatcgtcacttgtgcgtgtctgttcatataccagagtcttagtctgagtcatattgagcctgagggactgatggaatgagactttgagtggaactcagtccattctgatgataattgagctaaggttgagaaaaactaggccagatggctatactctgagtctaggatgactccgatgacttgtatgcgacctgatgggccttgagtggtccgagagcagcctagtgtaggctgagcttgtttgaaccctaggataggggaattatgttatgttatgttctgtgcttaagcctgatggctaagtattgatctgtaattatgtatgctttgatcaggccttgagcttgatattgttggtggcgggagccacagacctgggaaggaactacagtctgagaccttaccaggtaagttcagtgtatctggggaatgagttcccgctttggttgcacaccacactcctggggagtgttggtcatgattcatgatgcatgcattggctgtgacattgatgtattgagattatgtatctgcatttgatattgtgctgtgcttgagatatctgttggccaatagacagataccggcgttgaggagctccgccgtgtatctgggcgttgaggagctctgccacatcatgatattggccaatagatagataccggcgttgaggagctccgccgtgtattatgggcgttgaggagctccgcccagtggcattgaggagctctgccacatcatgacaggtactgacgttgaggagctccgtcagaggcattgaggagctctgccacctgtcatgtgctgagattgtgatattgctttgctatgatattgatttgttatgatgaggccagagggccaggccagtgggccttgtgtgatgtttatttgtttatgtattgtgaatctgtgggccagggtgggaatgatttcccaaggaccctgagcttactgagatatgttatctcaccccgtgtggggcttacatgatttcaggtaatgtttctagaagagaagatcagtctcagggcaggaggcccagttgagactaggctgcttgactgagaggcggcatggagagcttacaggctctattttgagttttattttgatatatggtcctgtataccctcatggagggctgatattcttttgtatcaccacgacatgtgtggtgtggactctaatgtatatgtctgtacagaacttttatgatatgtatgtgagacgttcccctgagcacatttgttgaatattgattatctgcctatatgtttaaattatctgtctatatgatgatggttatgaaaaactggatcaacaggggcgtggtatttcagttttaatgtgtgtgttgtctgatagatttattattccatacataatgtatcgagaaaaacgattctctgcttccgctaatttttttataatctatgttttatgcgctaatctgatattattaatgataacacgtcggaggcctacggggtgttacacctatctatatccctcagttaactccttgaaacatcgttttggaatctctcaagttcacgtgctttggcccaaatgcggagctctatataccaaatcaaagacaatttaatatagattttcaaggtaagatcaatattaacatttggggtcaaatacccactcaaattcaaaaaggggctaaaagggtgttttaggagtccacatcaaaagacatcattttgaaattccgatcacaccaatgtgaccagggttcaacaaggatcacagaaatgacatcagtttcataaaaaggagacttttacaacatctcattttcaaagggttttcaaaggacatatagaaacaaccaataacattacctgaatcacaagagacatcaagagagacctaaactagctagaagaagacaaaggtgtaacaccccgtaggcctccgacgtgttatcattaataatatcagattagcgcataaaacatcaagtaaatcagctcagcggaaacataggatcgttttcttgatacattatgtatggaaacgcataaatataagttatcaacacacacacacatatatacagaaacataaaccacgcccctgctgatccagtttttcaatataacataataagacagataatagatctttaggcagagtaacaacaaatataaacatacacatgtactcagggaagttatcatatacatatcatcaaagttctgtacagacatatgtgtcagagtccgcaccacacatgccgtggtgatacaaaataatatcagccctccatgagggtatacagggtcatacaacaaaatacaatcaaaatagagcctacaagctctccatgccgcttctccatcaagcagcctagtctcaactgggcctcctgccctgcgactgatcttctcgtccagacatattacctgaaatcatgtaagccccacacggggtgagataacatatctcagtaagctcagggtccttgggaaatcattcccaccctggcccacagattcacagcacacaaacaggtatatgcatcatacatggcccactggcctcatcataccaaatcaatatcataatctcaatcacatgacaggtggcagagatcctcaatgcctggcggagatcctcaacgccactgacggagatcctcaacgtcagacctgtcatggtgtggcagagatcctcgatgccactgggcggagatcctcaacgcccatgatacacggcggagatcctcaacgcctgtatctatctattggccaacagatatctcaaacacagcacaaatcaaatgcagatgcataatctcaatacaaacaatgtcacagtcaatgcatgcatcatgaatcatgaccaacactccccaggagtgtggtgtgcaaccaaaacgggaattcattccccagaaacactgaacttacctgggacaatatcactctgtggtctagtccctgctctgtggctcccgccaccaataagctcagaatcaacgcctatacaaggcatacatagctcatatcaatatacagaccacagatgtaacgcctaattcatttctacttatttacttatttatttttacgtataaaattttttcttcctttttcattgctttttaattttcgaaaatgcaataatagcccatagttgaattagagttcatttaatttttgaaaaacaagtgatgaaacgtagtgagctttatgtaatggctgtaaatattaaacatacatacgcgtttagttatcataatacatatccagtcataatacacctagttcagagtcttccaagtacacatcaaacagcaaaacattataaatcttccagaacctcttctcagctcatccaaatcctactgttcatctgctcgcccaaaataaattttggggtcatcacaggtgtcaaaccacagacacaaattatgggtaagtctatgttaaccataattaaaataagcatttaaatcaaaatacatagatatgcacttctatataaaccacacgaaattttaattaaacccagagtgttcaacttcacaacttttcaacttatggccatggtcaaaatagctcaacacggaatcagagcgatcgagtcaggataggtctgtgttgcaataggactcacacctacacagcatgtgatcatcatgggtaggtgctttccccactgaccttatccccaagttcagccaccatatgtctgaacgctcgtcataattcagctatatgacttacctcctttgaggtttaacaacttcaccacagggtaacaacaactccaatactaccataatcatatcaccacaaaataacaacaactcacaaccatgtttacttttaacacatacaacttttcacttaaacatcaacatacacaactttctccaattaataagcttaattacctcaataaagtattaggtcaaataataatctcaaccacataaaggaaatatacagatcacataaaacttgtaaatagaataacatgtaacttctttaactttaattattttcttaaaacctactattgattgtatgacaaataaatttagtaactttagacaaatccttaagaaagtatattcatcattttatcatcaaaataaagtgatataaagattcatggatgactagtgtacttactttagtaaaatatgtacatagaaagttagtataaaagttgctctaattagttggcttcctaactcattaccttgagttcctaaatcatattatatccaattacaagtcctaggtctttcttatcttggattatattaggttagttcttcactaatcaatggttaactaaaagtatatcgtcaaagtcataaacttgttatgtcaccatcttgtttgcttttaccaaattcccactacacaagcttgattttgattaaataacaattcaagaaacttaaacaaatgcatatttaactaggttaaaccataaacttcccatacctagaccttttcttggattcttgaaagcttttcccttccttccttgctttccacgtgaagtccctaagatgtggtcctagtcttttgctttttgtgtaaatgaaagtggaaaatgatgggagatgactttggtgaaggctttcacggtttctactccttttggatgaccaaaatttccaaaatccaagccttttataggtggtaaatattagttttttactacatgaaaatcaaggttaatgatggcttactttccttgtgttttaatcttattggctagggtttcttatctttccaagtggcttcatcctccacctaggctttttacttctcccttgatcttgttacatgtggaaaggaagattagctttgatctaaaatatcttgaaagcatttaaggctaactttttacttggtgattccttattggctacttcaccttaaccttccaagtggccttattcttgaaaattctacactcctctcccttgttatacgttggatattattgcttggagagcaatttccattaatttcgtagcttagctatactttgtgcttttcttcattcttgacttttcttcaaaacccgtattagaaaaataatggttctgaattcattaaccgttggatcttcttgaaattttaatggtatactcctaacttacatatctagcctttgaccgttgggatctttgaaataatgcttagcatttccttcgtatccaaaggagtcaagagaaagttttcttcaacaaaaatctccttaagccatcattactttctttacacatgctttccttctattggctaatgattttggtccatccaagtgtcatgcttcttgaaaattcttcacttttccttcctctttcacgttggattgcatccttgtagagcaagcctttcttgatttccttttctcacatggaatgccttagatttaagtgttttgtgttttattttcctactaggcttttatctcttttcctattggtccttgtggccttcttttgtttaaattacaaatctaactcatttaaggaatccatttatcctacaattaagagaaaactccaaagatcataacaattattttcctataattttctaatttccataatggtcttaaaattgagttttctcaaactttttctaaaaattcctaggaatttcattttataattcctcatcatatactaacttaagattgtcttatctaaagatattttatccattttataggtcctacaaaattttctaagtcatctggtcattttttatcacaggggtattttggtaattttacccttctagggacgtaatggtaatttttctaattgtccaagggtaattaggtcattctaatctaaaatatcttaccaaaatatctagaagtccaaaatatcttaccaaaatatctaggacccattggtcatttccttaaatgtttaagggcaaaatggtcatttttgccctaagggcattttggtcatttctaaaattgtgcaggggcatttttgtaattttgaccccaaaggtattttgtaattcccattttataggaatgtgttatcactatttattctgtccacatttctaattccctcctacagtttcttttaaacaagcatttttactgacgaatttgaaatactaactacgaaattaattcgaaatactaattacgaaatatacagataattagttggggtgttacaattttgatcatgtttcaagcatcccagagtatttataaagtttcctccttaagatatcttgctaaaatacctaagggcaatttggtcatttctaaaatgtctaggggtattttcgtcatttctctcaaatcttttgtactgtctagaattaccattttaccccagtaattgactgtacttcccaaaattttggggtgttacaacagacatcaatcacagctcaagcataacaaaagtcccctatcctagggtttaaccatttcagcctagcgcacactaggccataacaacatatacacaaggctctggtctatcagatgaccattacaagtgaccatacacagaccacataggccacacagagccaaaaatcaaaatcatcagaatcaaaaactgaaagctaatccttcatccccaactcgctctaagcaagtttctctactggaccctgggccaattctcgccccttatcagtgtgggtcacaaaactcagaaaaccccaaattcacagagacccaagagaacttggttttcttaccttagtggcgaccaaggagacctcagaactgcctcccccaagcactggtgcctgtctcctgccttgggtctcgcctattcttgagttctctgaggtttccactcaagaatcccaactctcactaacatgggattttagataaagagatgaaggatactagctttctaatcggttcaaacaaggttaaaggccacagagaagtgtttaggctagtatctgaggttcctaaaagcttggaaagtcatcaatggaggtttggaggtccaaggaagaaggaaggttgatttttcctctccttttcgcgtttttggcctttaaaaactggttctgccgacgttcccacgctactcgcgccatatatggcgctacccgcgcctcgttccagtgcaaaacagactttctggagcacttatggcgctacccgcgccaatctcacgcgactcgcgcgggatggcagaatcctatggcgcgacccgcgcgagactccagaaaagaatttggttttccagggcacttgtcgcgcgatccgcgcggcccttggcgccatccgcgccagactctctggtcacccacgctctccgcgccatgaccacgccctcagcgtcacatcttaaaggtatggcgcgaccagcgccacacctggcgcgacccgcgccgcacttaaaatcaggttttctaacctgaatccccgcgccaaccaatgttatgtacttagggttatcacaaaaggaaactaagattacctcaaggaaaccaagaaaggaggattgggatctctgttctctaccgaaactttgagaagagtttcgaagattccgctctgattaaaggggtcttctccgtgccggggtctcgtggcaagcaacggcgtcccgtggttgtctccggtggctgtgggtggtggaggagggtggtggtggagcttggagctgtttggcggagaaagaacctccattttcgtgacttggaagcttaaaaatgtattcagcaccgcctccactcgcccaggcgagcaaaaatgccagcataactcgcctgggcgagctgaccaaattctagaattttctgcttcagtgaaaaattaattttgcacgttacagacatcatttggacaatcacaacagtcaaaagttgtatatatgggttagaaacctagctttaaaatttgaagacgatccataagttaaccaatctagaatggttattttaccaaaataggttttgggtcaaactcgaaataacaccatttcaacgcaactgaagcaaattcctcataacttgacatctacaccaagcaattgtgcatggataattcatataacatttgaattaatctaaactaatcaaatagtcaaataacataataaatacatccaacatctattttcggttatcgaaatttcagggtgttataggtatcaacagcaggttcttgtatgttactcaagatcactactttctttcaaagaaaatgaataccacaaaattaccttcaagcagggtgcctccctcaattgccctccaatgtttgagggagaacacttcagtttttgtaaaaatagaatgcagattttcattcaatcaaatgaccccggtgcatggaatgcaattgaaaaaaggtcctttgatacctaccaaacctgttgataatgaaaaagtttccaaagaatgggatgaaatgactaatatggaaaaaatggtagtacaatacgattttaaaggaaaaggtatgataacctctgctttatcgtctgatgaatttttcagaactgttaggtgcaatagtactaaggagatctgaaaaatgctactcatgaaggaacagatgaagttagaagatcaagaaaacatgccttgatccatgagtatgagatgttcaagatgaacacaacagaaaatatctctcaactccaaactagattcatacacatcgtcaatcatctacttggtcttggcaaaacatttgatgtagaggaactcaacagcaagatcttgaaatgtttaacaagaccatggcaaccaaaactgacaacgatcaaaaaatctaaagatctatcaaagatgtttatgactgcactttttggtaagttacttgaatatgaattggaagtgtctcaactaacatatgcagaagatgcagacaaaaaatagaaaagcatagccttgaaagctacatcctcaaatgttgagaaagatgataattcaagtggagatgaagatgatgagaatctaaacctaattgtccaaaggtttggcaagtttatgaagaaacacaagaacaaaaagttcaccaagttgaacaaaaagaatgacaacatcaacaacaccaactacaactgctttgaatgtggtaaacaaggccacatcaaatctgaatgtccaatatatttgaagaaatagttaggtgaaaagaaagctaagaaagatgggaaatcaaagaaagcttacattgcatgggaagaaaatgcatcaacaacttatgaatcttgaagtgaaaatgaagaagcaaatgtttgcctaacttcaacaattgatgaagatgactcaagcgatgaatcagaactaaatcctgaactgaaaataataggaatacttcataataaccaagaggggggtgaattggttaaaccttggtattttaaaatcaaattcaaaacagagttttcaggatctttatcactttcaaaaccaagaaatcaatttactcaatcaaatgtctcagcccaataattcaatagatcaaaactgaacttgttgaacaatgaatatgactcaaagaattaaagatcaatgaataagatgagaattgagatatagaaataaagacacaagcaattatactagtccacttcaaaacttgaagctacacccagtttcttccaaccaacactaggttagagttccactattataaaatttccagttcttacaagcaattacaacatctcccctttatcaaccttagataaagatcagaaatctaaaacactattagattctaagagacaaagaaccatagaacactactctgttctttacactagggaacccttctctagatacaagcaggaacccattttacaatagcaatcttacacagaaattcaaaacgaaatttacacataacaattaaggagagagataacctgatgatctaatgaatgaatacaaatgaattaccaaatcaggttgtgaagaacttaaactcagaacatgcttctccttaatcttgaaaacaatcttgctcaagaatcattcaaagacccattgacattttgaatgaagcaagaagtaaaaacacttagaaaatcacttaggaattgcttgaaaggcttgtgtatactcagaaatacgaattatcaagtttttttaaataagctcagcctcaattcctatttataacagaatttgtaactagctgtaatcgattaaaacagaagttctaaaaattacaaattacactatgtaatcgattaaatggttttgtaatcgattaaagcagaaaacatatattttcaaattaagtgtgtaatcgattaaaacaacaaagtgattttccatataaagcctaagtaattgattacaatctgtggtaaatgactatcacagaaagacttaaaaacataacatactatgtaatcgattacgattcttaagtaatcaattaaattcattaacaaagcagttttgtcaaaagcaaaggtcaaataatcgattatcccaataggtaatcgattacaatgttcatcaaatattttccagattgaataaagaacatattaatcgattattaccttaactaatctattaatccaatgaaacatagcattttccaaaaaaatttcacttagattaaaaccttaatcaatttatgaaaactttgttaaattctttcaaaaacatatagtcaaatgaatgaatgaatgaatgcataatcatggatcaccagattaaactttcttttacacttgaaacagtcatttcttcaaagcatccaagcatgttgaaagctcaaaaccaaacgtgaatcaaattcttccattcttcataatgctccccctatatccaacatgaacttgatcaactaattgaagcttttaatgaaatgcatgtggaggctcaaaaacttgttatctccaataacaagcttaaaggtaaccttaaatggcatactgctaatctagcttcaatgcaagctgaactttgcaacttgaaagaagaaaatgaaaaacttgtttcaagctacaaagcaaatggttgtgtatgtgcctctttttcttcaaaagtagatgaaaacagagttttacaaaaagaatttgatgatttcaaaaagagtcattttgaaaagtatatgtctttgctatcagaaaattcttacttagtagatctcttggaaaggctctatcgaggaaaatgtagcctaaatcaaatgctaagtctgcaaaagtatgctggtgataaatttggattgagttacaaatataaatcaaaaccttttccaaacactgagtttgtacctccaaaacagatgaatcaaaaaaggttttcaaaaacaaagtatacccaaatgactcatttagaaagaggatcaaaatttgtaacatgtcattactgcattaagaaaggtcacacattacacaagtgttatgctagaaggttctatgtgccaaatggagaattcatatgggttcctaagaaaaagagaataatggctaacccttatggactcaaccttaatggggtacctttctttgctacttgatttgattgttgcaggtgtgtcttagagctaaaaagtcactatggtatttggatagtggatgctctaggcacatgacaggtgataactccatgctcaccaatctgactttaaaggatggaggatttttcacctatggagacaacaataaaggaaaaataataggagaaggcaatattggtgacaacttcaaaaccaaaattagaaatgtgctttatgtggaagatctaaagcataatgttctaagtataagccagctttgtgataaaggattaaaggtatcctttaatgataattgttgcttgatatgtgatggcaaaattggtgaggtgatctatgtaggaaaaagaaaaggaaacatctacttgcttgctgtagaacatgcattctttcataatataaactgcatggtaaataagattgattaatcatggttgtggcatagaagagcaagtcacattaacatgcatcacatgaacaagctcattaggaaagatttagttattggcttacctaaaatcaagtttgaaaaggactaactttgtgatgcttgtcaaaaggggaaacaaactaagatctcttttcaaaacaaaaactttgtgttccacctcaagacctcttgaattgcttcacatggatttgtttggtccttcaagaactatgagcttaggtggcaattactatgggcttgtaatagttgacgaatactcaagattcacatggactttgtttctgaaatccaagagtgatgcttttaatgccttcagaaaattagccaagcttgttcaaaatgaaaaaggctgcaaaataatttcaataagaagtgatcatggtggtgaattccaaaatgagcattttgaaaaattatgtgaagaaaatggaattaaccacaatttttcagctccaagaacacctcaacaaaatggtgttgtggagaggaaaaatagatctcttgaaaaaggagcaagaactcttcttaatggcacatatttgccaaaacatttttgggctgatgtagtgagcactttttgttacactctaaacagattactcataaggcccatcttaaagaaaacttcttatgaaataaacaaaggttgaaaaccaaacatttcgcatcttagagcttttggttgtaaatgttttgttttaaacaatggaaaggagtctcttggaaaatttgatgcaaaggatgataaagttatctttcttagatattcattgcaaagtaaagcatatagagtttttaataaaagaaccttatgcatggaagaatctgtagatgttatttgtgatgaatctaactcctcaaaagaggaaaaaagttgtgaaaatgatgcaggatcaatggaagataatgtcacaatcaataaatcatatgagaagaaaaaggatggagaaaatgaagagattgatccttcaactcttactcaaaggcctaaagactggagaacaacaagagatctctccctagacaacatcattggtgaagtatctaagggagtatccactagatcatcttttagaaatttatgttgtgatatggcctttgtatctcaaattaaacctaagaatattgatcaagcattacttgatgaacactagatgcttgctatgcatgaagaactaaatctattcaagagaaatgaagtatgagaacttgttcctaaaccttcttctcataagcgaataggcacaaagtgggttttcaggaacaaacttgatgaaagtggcattatagtaagaaataaagccatattggttgcaaagggttacaacaaagaggaagacattgactatggaaaaacctatgctccagttgcaaggttagaagccattagattgctgcttgtatttgcatgtttgatggatttcaaattatagacaatgtcatcaacatatatttgaacaagtaatatgtcactagcatatttcttgatgaacaatgttttatcaacttgtcctcttgtgaaagattgactgattagaaagttacacaatctttcaaaccaagacttgggtgcttgctttaagccatagagggctttctttagtttgaagacatgatttggatgtttaaaatctacaaaaccaggaggtcaattaacatagatttcctcctttatgtaaccatttagaaaggaactttttacatccatttgaaatttgagcttgaggggggtgaaggtggtgccatgaagggagaggttgaggatgggtttctgggagagggtgtttcgggggactaggatgtgtattaagcataacaaacattttgttctttaagaaaataaaaattatttttgtttttttaattagaattttcatttttattgtattatatatatataatacaataaaaatgaaaacaaattaatattaatttatgaataaaactaaaaaaaaatgaatcaaataagataaaaccatccaaaatccttctttgatttgaacttatccagttcaaaatctttttatttttttattctgaaataaaaaaaatagaaaaaatcacacttctataacaatatcttaatagaattgtacgtaatgatcaataaatttagtcttatcatatctatatatagatagattatgtagatatgcagataaaaatactagcaacaaatttttctataaaaatttatgaactggaattaacgaacaaccaatatcaataatagtgttttttagtataaaataaaaaatggggtgtggcccagtgggaaagtggggcgtggttcaactaacgattctttgtgcaaggaattctcatccttgatgaaaaatgaatttgaaatgtcaatgatggagaactaacattcttccttggacttgaagtgaaacaaatgaagaatggaatatttctcagtcaaacaaaatactgcaatgaattgatcaagaaatttgacatagagaaaagcaaggatgctgaaactcctatggcagccacaatttaccttgatgctgatgaaaaagggaaaaaggttgatgaatcaaaatacaaaggaatgattggatctttgttgtacttgactgcgagtagaccacacattatgctgagtgtgtgcctatgtgcaagatattaagctaatccaaaggagtcacacctcatagaagtcaagagaattattaaatacctgaaatcaactccaaaagttggtctatggtatcccaaaggtgcattattaaatttaattggctattcagattctgattttgcaggttgcaaattagataggaaaagcacaagtggaacatgccatttgctttgtgtttttatttcaacaactgaatctgagtacattgcagttggaagttgctggactcaaagtctgtggctcaagcaacaactccaagactttggtgttgaattaaaataaattcccttgttgtgcgacaatacaagtgctattaacctatcaaagaattatgttatgcactcaaggacaaagcatatagagatcaaacatcactttcttagagatgacattcaaaagggtaattgcataattgagtttattgacacatataatcaattagttgatatatttacaaaaccactagttagagatagattatttgctctaagaaacatgctaggtattcttgatgaatctaacatcttatagcatgcttatgatgtgtttgattacatgaaattcaactcacaaactcatttgcatcacataaagcaaaattcgaatcctgataaatgtcactattcatactgcataattctcgatgataatcgattaccataaattgtaatcgactactttagttctgaattgggccttcttcactgacttaatctattacatactcgtattaatcgattatagtgaaagatctcactgatgttatcgattgcaccatcgtattaattgattaaatgaatgtttagggctattaaaggttaagaactctttggagtaatcgattactaccacgaattaatcgattacttgaggttcaaaggtatacctctccctgaaattatcgattacaagggattcataatcgattacttctgctatttttgcaaatctgcacagctttcaatgaaaatctgtaaccttatctctaaattcaaattcaaattatggttcagaaaccagatatcattgggctacgtgatagcagttatgcttatttcaaaattcaaattttaaacttgttatggctctataaattcaaaatccatgagcctaacccctcacaccaaaaatcattctcctcctttagcaaaattctgaatttaatgttgctctgcctcttcttcctctcctttaccaaaactctgcctacccaaaattcgaaattctcatatcatcaccatgtctcaaccatcttcactcaagaaactcaaaaccaacaaaagaaaagtaggccaaaagttctaaggctgctgagaacaggttaaatacctggttctctactaaggtagaaaggaacaactatatgtagttccatgctacaaagctagtgctgcctccaaaatacatggagcttgaattggtaaaagtattatatgcttgtgccaaggctgagatggatggtgttcaatgctccaaagtgaatggagtggccatggaaatagatgacactgtatggaatgcagtggtaggcataacttttagaggagtcccgaggtttgaaaaagaaattggtggctattcaaagatggacacctatagaggtatgctgttgaatcctaatgcacaaataggaaacaaattaggtgttggcctaatgataactgaagataggcttctgcattacatcatcacatacattctcacacctagaccaaccaatcatgcatagatcactgatgatgagctgcaactgttgtatgggatgaaagctggaattcaaataaattggattctagctattgaagaaaccatgatgaaggcaaagaggctgctaagctatcaattcccctatgctgtcatggtctcaaggtttatggattactttgggattgatgtgtccaatgagatagttgacaacaccaccaacataatcaatctcatatccaaaaagcatctcaccaagatggggatgttgaaaactcctaatggatggaacatggttggaactcaagctcctcaaggagtggctgatgcggatgaagatgctgaagctagacttgttgagcagcaatggagttcttttgaatctcttatgattcaaaagatgaatgctatgatagctctgcatcatgaacattcaactgaagttcattcctctctaaaagacatcaccactagactaagccactagagactcggatgagtctcaaggactttgatgatctttagcttagtgtttatctttattagtttctggttgtgttgatgtatacaccccttaaaatcattgaataaattgctcttatggttttctacatcttcctttacttatttcacaattattgatctaattttgcctttgataagccaaaaaggggagaaaaatatatgtagggtgcatgggagtaaaataaaatataaggggagaaacataactgaacatttgctctgaaattgcactgataaaacataacataaacattgctcttaaatatgaaatgatatgaaattacataagaaagggggagcaataaaaatgcttatgaatgtgtacatcttatgcaaagaatatttgacacttggtcttggcaagaagctgaatctgtttcaggtatcaattaaaagttcctggaatctctctcctaaaagaacataaaggatcaagatgttcaattgaagtttggcatgatcaaagccaaaaagggggagattgttagacatagggggagctagagaggatcaagaagttgaggcttttatacatggaagtgtttaggcttttacatgcctattcaattgaatggtatatgtaatctttatatgtttaagtgttacatcctatgatccattgcattgcataaacatcatttatagttttgcattcatgttttcataaaagcataagttttgtaaataaattttcctgaaacataaagttttcatgaatgcataaaaagccaagtgtgctatgtttcaagttttggaaaaaatattttctcacaagtttaattgattaccaacaagtggtaatctattacttgacataggagaaaaattttaatcgattacaagattgttgtaattgattaaatagtacaaaatcaaagattggacttcctgtgataatcgattacagcaacatggtaatcgattacttggcaattatcttgtaaaattcttcctatgataatcgattaaattgttcataaatcttttccagaaagctcaagaacactttaatcgatcacataagtgatttaatcgattacttggcaaatactttgaataaggcttcctgtgataatcgtttacatggcgatttaatcgattacttggtcataagtcttttccaaaaagctcaagaatactttaatcgattacataagtgatttaatcgattactgacagttataacagttttgtctataaatagaaccaacttgttttaactaaaaacaatgaaaatatcaaagattttcataccctttctgaagagagaatagatactacaagctactgagtgcttgtcccacaaatccttcatcttcatgaaactttgaaagtatttctttttgggcaactttcaaaagaagaacctggagagaatattctgagattgttctctttcaaccttgattcaagtttggtaaacatttgcattcatctgtaatggatcaccaagttgtttttctccatactactttggttacaattcttttagaatttcagttttgtgtaactagtgcaataggtttcttgaagcttgtttataatagatttttctagcaggaagagtagagaaagggtttctctatgtcttgaccacagagagtctaagggagttagatttcttgttcttaatctaggtctaatttagggtgattgtcttagagttttcttgttcttggattcttgagtctagcttagaattgtttcctattacactctagtaaggaaccttgattggattggaagttgttgcttaagagctatagaggaacaaaagggaaaaaaggcaagagagaactttagagaaaaatcctagataaagtgtgcaaacaagagtgtaagtggtgagaattttcctatatacttgtgtttttgctaaccatttcttttaaaggatgagctcaaggggagaagaagccttgtcacctaaggcctttaggttgatgaaggccattacaaaacaaatggaggaattacaaaccaaaatggaggcaagattcgaggagttacatagggagacacaaagaaggagtaatccaatgggtagtgtggatggagaagcttatgaggataggaggaggagtgaatatgcatcctcttatggaggaaattatgaagaggggaatgagagggaggagtggagagaacaaaatcataggaggcaaaatcataggagacaaaatagagaggaggaagagtggaggtttaggaaatacgagaaagaaaggaggaatggaggattgagtggagttaaaattaaaatttcaaagttccatggcacttatgatccagaaatttactttgagtgggagatgaaagtagaacaaattttctcatgccaacattttgatgaagagaagaaagtgattctaaaagctctagaatttggtggctatgctttggtgtggtggaaccaaattcaaattgacatagggagattgaggaggccaagaataaattgttgtaatgacttgaaggggtgcttgagagaaagatttgttcccacttattactcatgagaagtccacaacaagctccaaaaactattccaaggctacaagattgttgatgactactataaggagatggaattgatgatgatgatgagggctgaaattgacattcaagatgtgttggagctacattcctatggcataattgaggagctagtccacaaagctcaaatagtggagcaacaactcaaaaggaagaaatctttcaaaaccaatggggctggaagttccagttggaaggacaagcctaggagggaggtttctcaagtgaaaaataaagaagaaaaggtggaaagctcaagtgagaacttaggcaagaaaattattttgaggctttgactcctattcaagtgtgtgaggatgaaagaaaagagagttcaagagcttaaaaaaaatactgcacttgatagaaataaaaaaagaaaaaacaatgagttacccaagaggaaaactagagagaaaaaaagagggaaaaaaagaaaaacaagttgagagcaaaaaatttcatgagaccaaagagagtttattcttgagagaaaaagaggtcaagagagtgttgttagcaagacaacctctttattatatggttcctaactctctttgtttggatgttgaaaagagaaaaattgcccatagccatgcaatctcttttggaggaataggaagatgtttttccaaaataaattcctaatggcttgcctcctttatgaagcatagagcaccaaattgatttaattctaggtttttcactacctaataggccagcatataaggcttcacccatggaggcaaaggagattcaaacacagtggaaaagatacttgacaagggatggatccgtgagagcatgagtccttgtgccatgccaattattcttgtgcctaagaaggaaggtgtaatgcccggtattttaagcatgtaattaagcctagatcaaggccatgattaaggatgatgaacatgcttaagagtatccagcgaaaaggctcgagaaagagagatactggtggttctggaatatggcgcgacctacgtgggatgtggcgcgacgcgcgtcatatgtgtaaatcagggcagatggctctgccatgtcacgcgagccacttgaagatccacgcgagtcgcgtggaaagtggtctggaaaaccagtttttctctggtttcccacgcggatcgcgtgggggtatggcgcgagtcgcgcggtgtctcggcaggttcacgcgagtcgcgtggatgttcacgtatctcgcgtggaagggccgagagtatggcgcgagtcgcgtggtttcgggcgcgagtcgcgtgggaaggtcggtgaagcttttataagaacgaaggtcgcgttttgaggggagaaaacatggttttcttcttcctctggaccctggcagccatgggagagctctccaagctcccatgaccttgttttgcgaccctaaaatccttcctgcaccgattatacctccttatatctgagtgagagcgagaatccttcctccctattccctaaaaccccaagttctgggaaaccttcagagaggttgagagaactcgagattgaggaggaacggcgactacccacggacactggagctacgaggaacgttccagaggtcgtctgtgtcgccattgaggtaagaaactcgagtttctccggttgattttctgattgggggtcttgggtgaatagtgacccatctgtgatagggctggaattagctctgggtccagttgagagaagggtttagtatgatgtgaggaggaaggattagctttcaatttgtgctttggagactgttggttttggctctaggtgaggcatgtgtgacttggactgagtcacttgatctgagacatgccagagcctttgtgatgggcttgagatgcctgataggccatgtagacggtatctggtgagatagaccgtccaagccctgagaaacccggaggatttgggctgttagagctttaagctctctatgaatggcttgtggatgagtctagaatgactctgaggccatggttgatctgagatagaccactgagggtctatggaaaggcttgtgatggatgagccttataaaccttagaatagatgctcaggttgatgggaaggactgtggttcctttcccagaggcagtggatgtctgctcgatgagcttatgcatgttttgatgcttgtatggtctgtgatatatgtttgtctgccttggtagggtttgacaccgtgggtgtcagagaagcagaccaacagacgaggctatagctgtggggcacggcttgccaggtaagctcatcgttctggagtttttccctgattatggtttgccactcaagtggagtgctgaatgcatgttatgcttaatatatttatatgtgctgtaagcctgaagggctgagaacggttcttggagtggaactcaggccgttctggaaaatctgaatatctgatgaaccctaggatagacactgagacggtgtgaggttcagtgattctgatgagatgcagaccatgaggtggtctgtgatggaacctataggataccagactggtatcgggctagttgaggttccctagccagaggaagagtttgaggactcccaggaatagctgagattccttgggaggtgccactgctctccactgaagtcctaaggatggattgccctgtatggaggttcctccttaggcaagtgttgattcggaagtcctggagggctatttccaggccagatgataaatagatatgctgtatttctaagagagggcttcccgagggggggggaactaaagcccagggcctctttgatgagccatgtctggttttttttaagtcctgagttgagggatctcctcaggcaatgtttgtatggtttcaagtcctgagtggagggatctcctcaggcgatgtatgtgtgttttagaggcggtgcctcttttgtgtggatagtgtccggagtatgacactgacaatagagtacctctgtgagacaggctgtgagagccaggatgaggtggaatacctctgatgctgagagcatccggttatggatccagatggctgggatgtatgatagccaggatgatatcctaggctgtgttatgactattttctgtattttatgcttgtaggtaaaccagggttagggacgatctcccagtaccctgagcttactgagacgtttgtctcaccctgtgtggggtttgtggttacaggtgcttcttgaggagaggagcgacctcagggcaggaggccctagtggacttgataggctggacgtgaggctgcagtagaagaccagggcagagcttcaagagtgaagttggtcttagatctctgtgtagttgtagggtatgtgtatacccatttcctgtacatattataatgtatgacccagctgtggtcttgtttttgagcatgtatgtgtataaatgatgatgatgtatataaatgtgtttcctcctgacctgtgtgtgtggttttatatttcatgcataatgtaatcaagataaacgattctatttgcttccgcaccgcgcttagttaactctgatagcgtgttatgaatatcattgatgataacatgccggagacgtccggggtgttacagaaggaacatggaggatgtgcactgattataggcaataaaaaacatcatcataaggtatagacaccctatccctagaattaatgatcttttagatgaattgcatggttccactatcttctctaaaattgatctaaagagtggttatcatcaaataaggatgagggaaggggatgaatggaaaacaactttcaaaactaaatttggactttatgaatggttagttatgccttttggtttgactaatgcacctagtacctttataaggcttatgaatcatgcgcttagacactttataagcaagtttgtggtgtattttgatgacattcttgtttatagtgccaatttaaatgatcatttgatgcatgttaaaagtgtctttgaggtgcttaggatggaaaccttgtatggagctattgataaatgtaccttttgcacttcacaagttgtatttcatgttttgtagtaggtactcccaacttcaaagagtgtgaaggatgttagaagcttccatggtttagcaagatttcatatgagatttgtaaaggactttagtaccattgcttctcctttgaatgagttgataaagaaaaccatgagcttttttagaagcaagaacatgaaattgctttccaaacattgtaggataaattgtctcatgtacctattcttgcattgcctaattttaatgcttattttgaattggaatgtgatgcatctaagttaggaatttaggggagggggtttgattcaagataaacatcctattgcttattttagtgagaaattgaagggtgcatgtttaaactattccacttatgataaatagttgtatgcacttgttagagtactggaaacttggcaacattatcttttacctaaggaatttgtgatccatagtgatcatgagtctcttaaatatttgaaaagtcaaggaaaactaaacaagagacatgctaagtggattgaatttattgagcaattttcttatattattaaacacaagcaaggcaaattgaatgtagtggcggatgccttatcaaggaggcattgtttgattactatgcttgaaactaagttgctcggttttaatcacataaaggaattgtattcaagtgatcatgacttctctagtatttttgctttgtgtgagaaaggggctcatcaaggatattttagacatgatgatttcttgttcaaggaaaagaaactatgtgttcctacaagctctttgagagaactcttcattagagaagctcatgagaacaacttaatgggacactttggtgtggataaaactttggctattttacatgaacatttcttttggcaaaaaatgaggcatgatgtgcataaggttgtatctcaatgtattacttgtcataaagctaaatctagattaatgcctcatggtttatatacaccttttcctatttctaacgtcccttgggttgacatttccatggattttgtgctaggtcttccaagatccaagaggggaaaggattctatattttttgttgttgatagattctcaaagatggcacacttcattccttgtcacaagaatgatgatgcatctgaagtggccaatctcttcttcaaggaagtggtgagatttcatggattgcctagaaacattgtgagtgatagagtcacaaagttccttagccacttttggaagacattatggggtaagcttggcacaaagctcttgttttcatcaacttgccacccacaaacggatggccgaaccggagtggtgaataggacattgggtcaactcctttggtgctacaccaagggcaatttgaggacttgggaggagtgcctacctcacattgagttttcttataatagagtggttcacaaaccacttccttatctccttttcaaattgtctatggcttcaatcctttaactcctcttgatttattgctattacgtaacacttcttctatgactaattgtgatgctttttctaaagcttctttattttaggaaattggatgaaaaggtgaaggcccatgtggagaggaagatgaaacaatatgctaagcaagccaataagcacaagaaacaagtggtcttcaatgaaggagatttggtttgactttatttgaggaaggatagatttccttaagaaaggaaatccaatctccaacctagagaagatggacattttaagattttagagaggataaaaaacaatgtatataaacttgagttgctaattgagtatggtgtgagtagcaccattaatgtttgtgatctttctttgtgtgatgtaggtacaagtgagagagaaaaattgaggtcaagttcctttcaagaaggaggggatgatggaggtctattgcaacctcaaggccaagaagaagaacttaaagaacttcctttggttagctttatagtacccattataagagctagaactaaagcccttcaagaacacatcaaagctaacttgcaccttttagacaagtatgaagaagcacatcaactttaaaataataggaatgcacacattaaccaagaagggggtgaattgatttaaacttggccttttaaaaacattaaaaaatcatagttaaaggatcttaatcacaattgaaacaaaaattcttcaaatcaatcaaaccactcagcccaagaaaacaattacttaaaacagaacttgttgagtaatgtagatatcaccaagaaccatagatcaagatagcaagaagagattaaggaatagaaaacaacacaagaatttatatcggttcacttctcaagagaagctacatcgagttcttctaatcaacactagattagagttccactattatcaaatttcagttcttacaagctttacaacaatcactctttatcaaacctagataaagaacaaaaaccctattagattcctaatgatcaagacatagagaacccttctctactcttccctctagagaaacccactctagaaaaatcttaaagaatcctttgcaaaagttacaaacagccaagaattcaaaaatgaatttacaacaagaatagagagagacaacctgatgatccaatgaatatgaatgaatatgatttaccaatcagagttgaaatgcagaaatcaattttagacttttctctccaaaaactttttgaaaactttgtccaagaaatctttcaatacaccatgaagatttaaaagatggtcaagaactatctagctctgaaaatcctttctaactttgagaaggcttgtgaatgctttgaaatttcgaagtcaagaattgtatctttcagacaaagtcacattctatttataaccaacttttgtaacagactgtaattgattaaatcgtcattataatcgattaaattgtcatatgtaatcgattaatcttccagataatcgattaaaatgttcttagctcaatctagaatttataacaaacaaagtaatcgatcaaaacgagttgtaatcgattaaaccaaacatgttttagttctgaaataagctaatgtaatcgattactgattgtggtaatcgattaaggcagacatgtacaatttcagaataagcctaggtaatcgattactgattatggtaatcgattaaggcatacatgcatatttaaaaatgaacttatgtaattgattacagtataatggtaatcgattaagacaaataatcataatttacattttgtgctatgtaatcgattacgagtagctagtaatcgattaaagtgttcttcatggcttttccagaatcaaacagaagttggtaatcgattatatccttgtgtaatcgattaaagaagtgatattttgtttttccaaaagcttaaccatgagaaattgacttctttttaaaacatgaacaactttaatgcttttgtaaaattatgtatgcatgttaatggtcacgttcatgcaacgtaaggatcataagattagcctctcatacacttaacccattacaaatgccttggcatgtgaaaagataaaatcttccttcaacaagcttcatctttgacttgatcttcttccagctcctcctatattcaacacaacttaagaaaaacaagggctggattttgtactcttaagttgaatttaattccaataccttttagtggtaatatgagtggcaataaataggcctttagtggcaataaaacggcctttagtggcaattgtgtaaataaatgtaggtacatttgtatgtgaaacaagcttccttagcttgcacctcaagcttaatttcatttgtcatttcacttgcatttagcttacattttcgtggctatataaggccagcttaaacatattgtacacacttttggttaaatcaataagaaaggtgagttttcttgttagagtttctctcttgttcttgtgcaagaacttcttagatcttatcaatggcttctcaatgctattgtggcaattcttgaaaacaataggaatacacacaataacaaagagggggtgaattggtttaaacttggcctttttaaaatctttagaaaatcggagttaatggatcttaatcacaattgaatcaagaatgcttttaatcaatcataccactcagtccaagaaaacaattagaaaaacttaacttgttgagtaataaagagaagttacatccagttgttctaatcaacactggattagagttccactattcacaaatttcagttcttacaagatttacaacaattggcctttatcaaacctagataaagaatagaaatctaaaatactattagaatcctagtgatcaagacatagagaacccttctctattgtttccctctagagaaacccactctagaaaaagcttcaagaatcctttgtaatagatacaaataaccaaaaattctgaaacaagtttacaacaagagctaatggaaagagacaatctgatgatggtccaatgaatatgaacgaatatgatttaccaatcagagttgaaatgaaaaacaagtttcaaaactttctatccaaaagcttctttataatcttgtccaagaaatatttcaatacaccatgaagatttaaaagtgtgggacaagaactttagaactcagagtatcctatcttaatttcagaaggcttatgaaaactttgaaaatttcgtagtgaagtgtttcatcttttagaaaaactcacaagctatttataaccaacttctataactgaatgtaatcgattaaattgccaaagtaatcgattaatttaactcgtgtaatcgattaaacttccatataatcgattaaagtgttcttagcataatctggaaaagttttacgaacaatgtaatcaattaaaatgatttgtaatcgattaaactagtcatgcttagttttgaagcaagcctatataatcgattacgattgactggtaatcgattaaggtagtcatgcatgtttgtaatcgattaaagtgttcatcatggctttgtaatagattgcacaagctggtaatcgattaaagcaatcacattttgtttttccaaaaccttaatcataagaaatcaatttcattatggaaacatgaaaacctttatgctttattagaatcatgtatgcatgttaatgattatgtttatgtaatgtaaggatcataaggttagcctcttaaccatttaacaaattacaaatgccttggcatgtgaaaagctaaaatctttctttttccagttccccctatatccaacaattcttcctagactcatgggagagcttctccatagtgtcatccatcttcattccttgtctcaatccatcttccattgctgaattctttggagctacttcatgccatttttgcttcacatattgagtgagaactcgagttcttgaagagatcttgaagagtgagtttcattgcaaggtagattgggaaaatcaatgtctaatgagtttagatatacatcatgctaagaggcaatatgaagtaagtatcattcgacaatttctatctcatgaagttttttccacaaaacattatgacacttgtagatatatatatatatatatatatatatatatatatatattttcattgatttatgaacaccatacgattttgttgttggtggagtagtatatttggaagatataatgatctttctaatggccaacaatattgccagatattgcaagatacatcttgtactgtgtggatactactaaacaaaattcaacatcacttaattaacatcgaatttaataaaaatcaatattataaaatacgcggtgatatttttgtaaataaaatatcattaacatcggtttttaaaaacacaatgttgatagtagaatgttagcatcagttttatattgatattgtgttttatcccttaacattggttttacgaaaaatcgatggtgtgtttataagttaacattgattttaataaaaactgatgttaacattctaatgcttttcattttctccgcccgtcaaaaaaatgaaagggagagaactggaagagagaaagcacaggtttggaaccctaaactacaagaggctaccactccacaatatcgtgttttcgagggagaagccaaatgcccctcggcccctaacgctcctcctacttttctgtcgaccactggtcaccgaatgtccatgctcaggttagttaaaagttaatactttcaaatcattccttttttggtttacaaagatgttgattcctgggttctcattcatttagaaccatggtgtcacagttggtgagagggatggaggtgttcgggtattcagcctagtccaattcccgaggtctcacctttctaaaatatgatttaaagtattcaggtattcaacctagatgaatactcggattctttctttatcgagggggtacttggccatggtcgagctaaatacctaaggtttcttcctgcctgaaagggttggatgtatttggctattcaacctagatgaatatgtaaggtttcacctttgtcaaataaggtccaaagtaatcgggtatttggtttagccaaatacctgggttcttatttttaccaagggggtacaaggccatggccgagagggtactacgtcatggtcgaagaggtcatatgctttaccagtattatatatacatatatatatatacatatatatatatatataagacatatcatatgagaaagacccttttatgtgagaatgatatcatcattctcatttgttagattaaaatgaaaagccaagattaaaacattttaaattcaaattaaagactcatttaaccataaaatcatataagatttatcaaacaaaaaatcaaatattttaaaggtttaatttacgtcaagatcatcaccaccaccaccaccatgatcgttgccatgaccactatcgttgcaaccaacatgatcgccaccaccgccgctaggtggcgatcacggtggtggtggcaataacgacaacaacaatcatgttggtgctgccgacagttgacaatcatgttggtggttgcgatggcggccatgacagttgtggtaaaaacaattatgacagtgatggtggtcatgataatgataggtttgagatattttaggacgtcataagttaatatttaagatatttgatttggtaaatcttatagagattttatggttaaatgaggctttaatttgaatttaaaatgttttaatcttggcctttcattttaatctaatgaatgagaatgatcattctcattctcacataaaagggtcattctcctatatatatgtgtgtgtgtgtgtgtgtgtggtaagcaatttaatctctatttggtagagaagaaattgagaggaatatagagaccaaaactatttagtttgtttatcagaaagattatgtggaaataatttaaaaaattgtagggctcactgtattatttttttatacctatttttacttacctctctatctctttctttagctccttttatttctctttagccaaatatttttcatttttactttatttctcacctatctttacttatctaatttattttcatccaccttatctctttcttatgtaatagataggacattaattaaacaaccacccaaagaaaaataggaaacattaataggtaatgtttcaaaacttggaccaattattgacttgcaaggatattggatcactaggtcattggacaacaaaactacaatgtaggcataatccatgggttgcacatatggagcaatatgattgaaggtttcttatatacaaataagataagagacatggattttctgatgtgttgcatctgtttccatcactacacagcattttgaccaaatttacattacatattttacatctaggccttatttttagcttgttttcactgttttcccttattttagaatttgttaaactttttgtgtctttttttgttagcataggtattttgggcttggaaataccaaagttacacattggaaaacatcaagaagtgtagccaagagcttttgaggtctaatggatgaagtggaagcaatttaggagagtctggaatatctcatggttgtaagatccatctcaacccattagatttactacttttgagcttgcaaatctacagagaatctcacggttttgagttgcatctcatgcccgtgaggtcatcacgacaacactttatgttttttccacgcttctgtgtattttgggtctgaaccttttattccactacctttaaatatctagtttttaattaggtttaggttctaaactttgaacattgagcaagagcatgaactaacatatcaaactcactcttttgcagttgatatttctcttttctgatttttgctttgttttcatgtctacttgagtagtcctctttgtctctaggactggatgtaggcttatgaactttgaatgaatgagtttatggtatccttgtgttattcttgttgtctcttaatttttttctattgcttttatatgtttaatgaattaggcaacatttaacataatcataagggttttgggatgtaccaataggtaaaccaataattccaaaaccatatatagaaaggaaaataggtgtaaaaccacgatagtaggtcaaactctaagattatcaaacgaaataacatagagtgtaaaatggtccaattgaacatagtcaccacgagagtagggggtcaatttaattagttacctcttcgtatctcgagagggagctgagagtacctttggattattctcctcaataagaagttgcaagaaaaccttcaataagaacttgcaagaacacaaggataatttaattaatttgtttattttcataacatgaacccaatcctagaagtttttatatattgaatttcaaccatttaattgctttctttttttctaatttgaatgctaaacttgaatctttctgactcagttgtcattttaatttttaattcctctcattttaattatttttaattagcaataactacttttccaaatacacagtccttgtgaagaacgacttatttcttgatgacatcatacatttgcaaatttgtctatcatattttattcgactaatccatatgaaggctaattgctaaaccacttaagcatttatgccaataggatcgatgcttggttgtggtctgttcgactaatttttctccttgtgaaggcccactaccaaaccacttaaatgtttatgccgttaggctcgatgcttggtgggttgtggactgtccgatcgaattttccttatgaaggtcgactacaaaaccacttaaacattccaataggctcaatgcttggaaggttgtggactgtgtgatcgaatccttcacaaagaagactgacttatacttgtgaggttgttgaaatttagccaagtgaacaacaaataccaataccaaaaaagcatacctcgctcccttaccaactttaatacacaaccaacttcatctttcctagaacccaaagggacatcatactatcatgtatgtacccaaaatggttgggtcgtggtgacaacactggaagggtattgcatccctaacatgtcaaagacacaacaatgcacttgtaccttgtacgaagtcagcaaaactatgctcacatagtggcgtgccttgaggggcacaataccatgaggacatgtggataggtttattggagggcaccatatataaatagaggactggtacatgactcttctaaaattcatggttaggtagagttggagggagacgttgatggaggcttcagcttaaggcacttattagttatctttctctctactctctagtgttctctgatgtgaacaaataatcttatatgaaataacaataatcacactagaaggggggttagataaagtgttaatcaaagataataacgttttttaacaaataaaggcttttatcataggctcaaaaagatagatatactagagttatccactaatgagaaaaactagaatatcaaccgtcacactagaatgtgggttgaatagtatgttaatcaatggtaagaaatttttcgtaaatgaagagctttaacacaagttcataaagatatatgcactggagtcgtccactgataaggaaaaccaagtttagtgaaaacagaggttaatcgtccaataaatataaagtgatattttcaaaaaggtttttagataaacgcttggtgagaaaatagtgacaaagtaatctaagagaatacttaataaaaccacttaagagagacgtagaaacacttggtttatattggttaactcaaacaaagctacttctagttctccttgatgctactgtaaagggtgtcactaaacaaaactttaattacaaaacaagtattttatcttgtcacccttggctatacaagtattcttctagacacttctaggcaaaactttagactccccttgaatgtaagaacacctaagtattgtttaacaccaagccactcctggctttcacaaacaaaagttttaatggatacaataactcaacaacatagagagtgaataaacaatataatctcgaatacaaatgacttagcaatagataaacaatataaactcaagcgtatcattcagtgattttgcagagttttgcttgtttctttaatgatttttgtgtgctctgcttatgactagagaatatcttttatagacttcagtgaaggattcattacaagattagtgttgagtcttgatatgaccattgtctcacatttgaaggcgagacaacgtggcatgctccacgttgaaagcgacctcttggaataatattctataaataccttatattctcttatattccattagttccttaaattcaaatgttagcaattcaaataaagaaaggaaaaatgaattttgtaaagagagatttttcatttcccttatggctaacactatctttttacactctgttggatgtcacttttaagtatataaaatgaatatgtaagtgatacataaaaagtgggtgagaggcaaaaaacaactcaatgtatagacattgcttttcacaataaatggatgcgattgattttacagcgcattggacgttggatgcatcttaacaaaacgttttcactttaagtacatacatgacgtgctagaactgtagatgttgatataacaacatttaagcttttttacacgaagatggtcctatgcacttaacaacaactcattagattatcaataatttatacttttgtaaacatcaaaactaaggtgtgataggttatccaatttaatggatcggccatacctaaaaaaaacaagtttagtgaaaaacaagtttagttgcctagtaataataaagcaatattttcacaaaggctttttagatacacacttggtgagatgatagtgctaaaataagattaaaagaatactcatacataactatgtccaattctcctttacacaactgtaaagggttccactagtcaaaactttgattacaaacaaaagtttgaatgaatacaatgattcaacaactctcaaagagtgaataaacaattaagcttgaatacaaataatttttcttaacaaaaagtaaagaagattaagtgttaagtatatcgtccgtttggaactttcttgagactcgtgatgatcaacattgggggagtggcctttgcacgactgggtgacctcgacagttactgctaagttttcctaagtgagagtatcacaaggacaagcttaggctatttctttatgaatgataccacattacatttgagagttgagtcgggtgcatgcactattctgagcataattgatttgaattttttaaaagttgatgactaatttgttaagtgtatgttgaactgatagattattgagaattattgtgatgaattgttatcatgtttctttctattcattgtcaatctgatagccattaatcttttacgataaactcacttttcattttgtaccatgtggtgtctttggagagaggtcttttgttgaagtcaccaagacgacatgataacattggagttcattttgggagagttgtgttttgttatcaaactcttccttagctagttcctttatttttttcattcgacatgtaaatttaaagtttagatccatgtaaaacttgttgaatttaaaggatgctgcaaggagattgaaccatgtttgaagacttgattttggttttagctttttacatgcccaatcacttgaaggcatttgtaatttgtctaagtggttcaagttaaatgtcttgtgattcttcattagcatgtgcattttcatgatcatgcattcatgatttttaaatctcaaagaaaacaaatggttttactaaaagataagttctcaaggcttgttgtttaaaaaaactttttcttactgctttaatcgattacacaagaggaataattaattaaagacattcaaacaattctggaaaagccttgaagaatagtttaatcgattacatgctcgttttaatcgattacatagtgttaaaacaaaactatgctttgctgatttaatcgattaccatttgtctgtaatcgattatattgtctatttatggaaaacaagttgtgctgtgataatcgattaccaggaattgtaattgattacacaagtattttaaactttgatgacttactgtattaatcgattacagtgcggtttaatcgattattttgttcatgaaacattaccagaaagcttaagaacaatttaatcgattacatatgccaatttaatcaattactctagcgaattaatcgattactgtcagttaaatctattttttttaacagcttggtgagtccatttctttataaatagaccttgtgcgattttctaataataagtgtgacttacccaaaaatctaagagcttttagaagtgctaaaatttgtgtttctctctaaaattaaaacaccatcttgtgagatcaagaaatctgaaattttgaagaaatgttttagaaacaagaaggatttcatgatttgataatgagaattgattcttacaacctgaagaatatggtaacatcatttctttcattcattcatgaaggacataaggttgtgtttatcttgaacccatctttgttaattgttctaaacattttcctattgtattgatatatcattgagtttcttttagagcatgctagagtagggttctctagtatttgagattctgagtagggttcttagtttcttggtgattgtaattctcatatggttttagaattcatatctttatctagtgttgatagagaaatcacatgtaaaagaatctttgatatagtaataactgtaacctagtgttggttggaagcaactggatatagcctccaaggttgagaggtgaaccagtataaattggtgtgttctttattttatttctgttcatatctcatagattgaatttggatgattaagaattagtcaacaagatttagtttcaaacattacttgaactccaagggtgatttaggttgaaagaatgattctgtatttcaaaaggtttttatgtgatacgatccatcttacatattctgcaaatagtttttgaataaaattttaaatccttgatataaatcaattcaccccccccctcttggtttgtttgattactgctcattgtattttcaattggtatcaagagctggttcttgaaagttattcaatatcactttcttttcaaagaaaatgaacacaaatcaaataacctttagagagagagcttctctcaatcatccaccaatgtttgagggtgagcattttagtttttggaaaaacagaatgcaaatctttattcaatccaatgatcctagagcttggaatgctattgagaaaggtcctttcattcctatgaaaactgttgacaacaaattaatccccaaagaatgggatgagatgacagatgtagaaaaaagagttgtccaatatgactttaaagctaaaaatatgattacatctgctttgtcttctaatgaattttttagaactgtgagatgtaggagtgcaaaagaaatgtgggaaatgttggaagtaactcatgaaggaactgaggaagtaaggagatcaaggaagcatgccttggtacatgaatatgagatattcaagatgagtaatactgaaaacatttctcagctgcaatcaagattcacacatattgtcaatcatcttctaggacttggaaagacatttgattctgaagaattaaatatcaagattctaaaatgtctaacaagaccttggcaaccaaaaggcacaacaattaaggaatccaaagatttatcaaaaatgtccatggctgcactatttggtaagctacttgaatatgaacttgaaatgtctcaactaaccattactgaaggtgcagaaaaaaaaacagaaaagtattgctttgaaggctgcatcatctaaggttgaagaggatgaagattcaagtgaagaagatgaagatgacaacatgaatctcattgtcaaaaagtttagtaaattcatgagaagaaacaagaacaagaagttcaaaaaattcaacaagagaagtgataacaacaacaacaacaacaacacctctaccaactttacttgctttgagtgtggaaagcctggacatatcaaatctgaatgtcaaatatacttaaagaagcaacaaagtgagaggaaaatcaaaagggaaggaaagacaaaaaaggcatacatagcttgggaagaaaatgaatctactacttttggatcagctagtgaagatgaggaggaagctaatatttgtctcacatccacaataagtgatgatgaaaactactcaagtgctgaatctgaggtaaattctgagtatgataatatatttgatgcctttaataaaatgcatagtgaagctcaaaaattagctaaagctaataaccaagattgcagaattgcaaaatgaattttgtaaattgaaagaagaaaatgaaaaacttctttcaaattacaaaatcaatgggtgcacatgtacatcttcttcttctaagcttgataaatacaatatgttacaaaaggagtttgatgaatacaaaaggattcaaggagaaaaatatatgttgttactttctaaaaacaatgatttgattgatctttcaagaaagctttttaaaggtaaatgcaacttagtagaaatgataagtgtgcaaaaatatgctggagatacttctggcttgggatacaaaaagggttcaaagtcctttggcaaaaccaactttgtaccaccaagacagaagaatcaaagaaacttcagcaattcaaaaatcaatcataacactttctttagagattcatcaaaacctataatttgtaactattgtatgatgaaaggacatacatcttttaaatgctatgctagaaagtattatgtgcataatggagagtgtattttggtacaaaagaagaaaaagttagctaacccttatggacccaaccttaattcggaggtttctttgctacttgattttaattctgtaggtgtgtctaagagcaatatcatcattgtggtgtcttgatagtggatgctctaggcacatgactggtgacatatccatgctaactgatgtcatattaaaagatggaggttatgtcacctatggagataataacaaaggcaagattattggagaaggaaacattggagataactttaagacaaaaatcagaaatgtcttgtatgttgatgacttaaaacataatctcctaagcataagtcaattatgtgacaaagggtttaatgtctctttcaacaacaagtgctgcttgatatgtgataaccaaagtgatgaagatattcacattggcaaaaggaagggtaacatttatgttttgtccaatgatcatgcatttttacatcatactagttgtttaatgagtaagattgatgaaacttggttatggcatagaagaactagtcacataaacatgcatcatttgaacaagcttattaggaagaacttagtagtaggattgcctaagcttaagtttgaaaaggacaagatatgtgaagcatgtcaaagagataaacaaactaaaaattcatttcgaagtaaaaatgttgtttcaacatctaggcctcttgagttgattcacatagacctgtttggtccctctagaactatgagcttgggaggcaatttctatgggtttgttattgtagatgattactcaagatatacatggactttatttttaagatccaagagtgatgctttctcagcttttgcaaaattggccaagcttattcaaaatgaaaagtcaagtaatatagtttcaattagaagtgatcatggaggagaattccaaaatgaacattttgaaaatttttgtgaagagtttggaattaaccacaattttgcagctccaataacacctcaacagaatggtgttgtggacaggaaaaatagatcacctgaggaaggtgcaagaacacttctaaatgaaactaagttacctaaacacttttgggcatatggtgtaaatacggtttattatactttggataagattctcataaggcctatcttgaagaaaaccccttatgaactatacaaaggtaggaaaccaaacatatctcatttgagagcatttggctgcaagtgttttgtattaaacaatggaaaatagtcccttggcaaatttgattctaaagctgatgaagcaatttttcttggctattccttacaaagtaaagcctataggattttcaattaaagaactttatgtgttgaggaatttgttcatgttgtatgtgatgagactaacccatccaaagagaatttggagtgtgatgatgatgcaggagaagaggaagaattcttgcaaatcaatgatctaaacaataaagaaaaagctgaaccaaatgatgagctggaacattctacaccattgcaaaagcacaaagaatggaggacatctagagacctttcacttgacaacataataggggaagtaacaaagggagtatctactagatcctttttaacaaatatttgttgtaccatgtcttttgtctcacagattgaaccaaaaaatattgatcaagctttgctagatgaacattggttaatggctatgcatgatgagttaaatcaatttaaaagaaatcaagtttggaaattagttcctagaccatcttctcatgtacctattggcactgaatgggtttttagaaacaaactggatgaaagtggcatcataataagaaacaaagctagattggttgctaaaggatacaaccaagaggaaggcattgattatgatgaaacttatgctccagttgcaagattataagctgttgcgtactcgacaagtgcatcggtcgctcaagtaataaagtgataagaagatatcgttcccacgaggattgtttgaccaattaaactataaattatatcaataagttggataacaaataaataatgaataagattgttgttgtgtatatggaataggcgacattaaaaactaaatataaacatggatatatatggacaaactatggaggaagagaatgatatatgtggttgagtagctagggcaatccacaccaaatgctccctacccttgttcatgtattgtctactaccttcctcaagcctaagttactcaaatatgcatcttcatacaatgatagctaagccctacttccgtagtgttcttaaccctttaacccaccttaataccctaatcccttagtgatattggttaggtcaagcattaaatgatgcattaaatggttgcaagcatacactcctatccctagttaatgtaaagcttgtcactttacctaagtccaagcataaggccccaatattcctattgtaaaacccagctcttagtacccaactagagtgatcagttccagagagatagaacatgcattcaacaagataaagtgaaataacttggcattaatgaaagatagcatccaatacaatcccaaaagaggttacattcagtgcttagccctaactacaatgaagaactagccaaacctcataatgggtggctgtgttacaaaataaaatggcatacctagctgaagcaaggaagaagaagatggagaaaaccccacttgaaccttcactctccctaaaccctagctaaggcacccaagcttctaaaaccctattttgtgttgtgtctccctccaaaatcgtgcattcaatgctgagggttgaagcatttatagtggagcttgtgaagtctctgttttgcccttaaaatgctgcttctgtcgacctgtggcgcccttggcgctagtctggcgctgacggcgccaacatgcaaagtgaatggcgctccaagcgtgaacatggcgcccaagaaggtctggcgctcttaacgcggaaactggcgctcttagcgcggaagtccagtgaaggtaacgctccaggcgccattctggcgctctaggcgctgagtatcagatcttatggcgcccctggcgtggctgaggcgctcctggtgccagcttccagaataaatggcgctgggggcacgactttggcgctctgagtgccaacttccagtgcttttggtgctcctggcgccacatatgagcgccaacttccaatgcttttggtgctcctgcaaacttggctattttcttctaatttttgcttagtcttggcacttgtggtcactttcctggcaatttaacacattagctcaattcaccacacaaaaagggcaattatccatgcttaatgctcaattcgtgctataaaaaaaacttaggaaatccttatatgctaggcgtatatcaaacaattcccagatttatatattgttgtcctcagcaataaacaaagttcgagtaggaagcatggatcaattctctaggatcaacattgacaaaacaatccttgagtttaaaatgctacaaatgactgagccaaatcaaaacttcacacaaagctttcaaatccatcaaacaatgaagtctaacttgaatacctctcacagatgttatatttcactcaacactctagtgtctgggtattctctcaatccatcacagccctagaactaccataagcttgatcttattctcaagttcctacaaaaagaacacaacatatgcataactgatcaaaaggtcttaaaaggtttgtaacttggtttggcttacaggtaggatcatttgggaagtgactaacaaggattgagattgaacttactatatttctaagctttttctctttcaatctatcacttctttccacttttcttttctttattccttttctttcaacttgctaattctttccttttcatttatcaattgactcaactgaatgccattctttgtttttcatttctttttatttttgtattcaccttgatatttgaattcttttcttgcaaaaccacagattaatgaacagttcaatcccaactaaggtaagataatggatgtggtttgatgtgttatcaggtgatcaaacaaatgaggcttcaggttcaaaggggctagcaatggtaaaaattgtaaggaaggctgtttggcccaagcttatcaaaacaaaatacctttatcatatcaatcatgcatgcatcagagagaaacagagcaagttctagagtcctattgttgtgaggtcactcttagacaaaattaactgtttaaacccaaacctcacaggctgtggtacaagctagactcatggtgatgtcaaatcaaataatgcattccatttcgaaatgaactcagtcatacaagcattcacactctcagttaaagtttcatacaacatcaattcatgattcatatcactagtgctttccaaaaatccacttcacacttaactgattaagcaaatctaaatccgggacaggtatgccttagcaaaattgtctaatatgtacacctatggttaggttaaaattagacgcaaaatgaattgtagttacttgcttgtataacttcacaaaaagagagattttgttatcaaaaagtatctgatcaaaaaggtatctgcctactgttcatgttccaacaaaaagatgcatgattaacaaaaagacgcgtgtttcctcgattaacgtgcccctattcccagatttaaaccctttgctgtccccagcaaatgagacgcataaaagaaaacatacaacagataacatgttaataagaggaaacaactcatgcaaatatcaacagcagaaagtcatatatatacgggcacgcactgacggtgccaaaagtgtgcaaatgcgtcatgtactgaatgtaaggtgcagaaaaattaaatgacatgaaaataaagcataagtaaaataaaaagatagggaacgagaaggatcagtgagtctggtcctcgtccatggtgtctggtccagctgtggtagaaggtgaagcatccggtgatggcatggcaaaagcgaggggtggaggctgtgatggagagcgggtaagatctacaaagaagtgctggcacaaggcagtgaccatctaagtctgagcgtccagttgctcctgcatcctctggatgatggttgtctgctgctcgatctactgctgcatccgcaaataagaggctgaatcctcaaagatatgctcgcggtgtggatggctggaagcagcgggtatgtcctgtggtggtggggatgatgctgtcggaggctgaggtggtggagctggctgaggtggtgctggtgatgctggcggctgatgaaggtctggaacctctggcataggctgctctaacccgtcacgaggtgcgtacctcggacttcgggctaccatctcttcaggggtgaggtcggcaacgcggaggagctggtcctgaagcgtgcgccggatggagtcctggtaggtcttctgcgtcagaaggttccccagaggcacgtctaagggctcgtcatcgggaatctccaggcccgcgtgtacacagagatgggaaatgagtgaggagtgagcaaggtgggacctagggctgccgtcctgaatcatgtgcaggatacggtcagataaagcataagagatatcaaggttgatatctctctgcaacacatacagtaggcaagcccgctccacattcacatccgtcaagttagaagacggcagaatggtggagttcatgaacaaatgccaaaagttcgactccgcgtgcaactcgttccttcggagcttctcaggaacgatgtcggagccggtcttcatccgccaagcggagaatggaccggtgatcccgctgcggagctcgtctgccagctgaggcatatcatcacgatacgaagtgcggccagtgcagggaatgggttgcatgcggttgtaccgctgtacaaacccgcagcgtcgtgagctgtcatgggaggtccgcagaaaactctcgataaactcctggtcgaaggggacgaccacgcctctcacccagctgcgccgctgctcggccactgtcgcctggtccacgttggcgcagaactccttcgctatggagctggagctgtcatcagcgaagctgaccagtgtctgccactggcggcgctcaatcacatctcggatgagggagtcctccggtaggtcctcccagtctataacgcgctctaagatgaacttcttcggcaagaaccatttgtcgaagcagtcctggttctcccgagaaaggaagcgtccatcgtcgtagtcgaaggagcgaggcctcttgctgctggtcccggcggtggctttcttcttgcctgtgtccacctgtttaccctgaaaagcagaaatttccaatataccatgcatgcggcatcagggtttaataatcatcaggtatggtccgtaaacagtgaacaagcaattcccagatttgaattataatatatcaagcagcagggcatcaggcaaacacaacatagaaaacaggtatgcatactctgagtaaaatggtgtttcctagatttagctgagttcaaatggttgacagtgagggtacaacatgcctaatgatatcaactattgcattttaagcagtggaccaatggactgatggatacgaatgaaggttcaagataggggtacacagctagtgtcaaacaagtaaatgcacagacccacattgatcaatttcacccttgaccaagatatcctaactcaaattcaaccatgctcatatcagggtcaaagctaacaacgaggttcacaacttaatgcagatagtgatgaataaggccaatatcacagaaataccacagaaaacagttcacatatatgttgaaccccaaaatgtccaaaatgatctttacaaacacgtgaaatgctgtcacagttatgcaggtgcagagaacacagagaagcaagtacaggttaatgtagaccatcatcaaaactcagaaccctaagcttgtttctaactaagttcagaatgaatcaacgtcacagcatgacagaatgcatgacagaaaatgtcccatgttagacaatgcaattgtgacacaacagataactatgaaaccatgatagtgctaaacaattgtagaatgcattcattcacagctttacatcaaagggcacaatgtcaaatacaaaatcacagccacatcatgagttgtacataattcccagatttaggtttaacaaaggatggtgcaaggaattgtactccagcctaacacacactcagaccatttcatgaggcaaatacagttgagacgataactacagacttagtcttacaccaagattcagatacctggcttttcattgaaacaccagagaatcacacctagactttactaatttaagattacaaccatcacaagggagtaataaaatgaaagtggtccagttccaacagggattcccagatttgcttgcaataatgggagtatgaaatgattgtgtaatgtgagaaaatctcaaacaccagcacctcagtgaatgcatttgacagtgcagaacaaatgtagaatatctcacatacacagctcaacaccatagattcatacgattatgctcttcaaggtggatgccaaactgaagtcacagaagtatcataattataaaagtaatgaactgttctatttcaagcacaaggtctagattgtatgctagtatataagcactatcactagaaggtccacatggaaaccatcattcccagagtacttgttggcatacatacacaatctcatcaagagcattcaaatggaaaaccagaatgttcagaataaaccacaatgacaattgctaatgaagcttgaacctaaggtatgacaacactctcatggaacgaaacaagtgagtgaacatgcttagaaacaggcttagcagcaactgatatcactcaagaccagagttgtgccaaatgacaatcaaaaggaatgccctacagaagaatccgacctattgcacatcaattaaacaccccaagcatgcaattttaccataatgttcaaaaccccagtgccctaaccttaagcaaactgactaggtcccaatcatcctaacacaaacgtgaaatgaggaacataccttgtctcgagccatgaatgcgaatgaaggactgaaggaatgcgcaaaagattccacgagacacgaacaaccactagttggaatggggagaaggaacgtggatggagggagagagatagtgagcgtgtgaatgataagggaaagggtgagggagactaaagcttgagtaaggaggcgctgaaatagtggggagaagcagaggtgaggtcggaatgttggagagaatgagggagaatgagaagagtgaaagacaatttgaatctaaaaagaaaataaaacggcgcccgacaggtggcgctgatcgcgccactgccgcgctccaagcgcgaaatgccagcaatgacggcgctgtaagcgctagccttgcgccaaaggcgcgacaatccaatgaaattggcgctcatcgcgccaacatgattctgaaggcgccacacctaaatcttgaagcccagccagtgctggtggcgtcaccaccgcgcccagagcgcggaaatccagagaagttggcgccatacccacgctggaggtgcggtttggcagaaacagtggcgcctatggtgccattatggcgcgatcagcgcggtattccagaagtgttggcgctctaggcgccaacttggcgctttgggcgccataagccttctgcagtcatacaaatgcagaaaaggactggaattctaagagtattaacaatccttaatgaaaatgcaatatgaacctaattgatcatgcgttactgaaaacaaaaccaaattaaacacaagtataaaaggaatgaatgttcttaaacatatgaaacttatcaacaataaatgcacagctattgatctactctatcctaagaattagattcaaacctattactaaacatacagttgagttgcctctcaataagcgcttgtttaacgtcgcgagcctgacgggtaatcctctaaggattaggagagcttaaagggattgcaacagcatccctatcaataggtccaccatggtatggcttcagccgccatccattgaccttaaaaggcatgtgggtatcaagaggggagatttcaatggtcccataaggaaaaaccttgacaaccacaaagggtccagaccatcttcatttaagcttaccaggaaacaaccgcaaccttgatttatacaacaatacctgctgccccggttcaaactccttggggtgaattttcttgtcatgccacttcttagttctttctttgtataacttggcattttcataagctgcaattctaaactcatccaattcattcaattgtaataaacgtttttcatgagccttggtgagttcaatatttaaaaacttagtggcccaaatggccctatgctcaagctcaacgggaaggtggcaagacttaccatataccagctggaagggagacataccaattggcgttttgaatgttgttctgtaagcccaaagtgcgccatctagcttcttggaccaatccttccgcgagttcccaacagttttctctaagattctcttcagctctctgttggagacctcaacttggccactggtttgtggatggtacagtgtagcctccttgtgtgtgactccatatttggccaacaatctttcaatttgtttgttgcaaaagtgtgttcctccatcactgatgatggctctgggaactccaaagcgtgtgaaaatattctttctcaagaaggatgacaccactcttgcatcattggtaggcaaggccactgcttcaacccatttcgagacataatccacagccaccaagatgtattggttggagtatgacttgggaaatggtcccatgaagtcaatcccccaaacgtcaaatagttccacctcaagaatgctgttgagaggcatttcatctctacgggagatattacccgttctttgacaacgatcgcatttctcaacaaaatctctagcatccttgaagatggttggccaataatagccactttgcaacaccttgtgagctgttctatttcctccgaagtggcctccatagtctgaagcatggcaatgctacaacaccttgggcacttcgaactcagcaatgcatcttcgaatgacgccatcagcacattggaaatataggaatggactatcccaatagtacctctgggcatcatgcaagaacttcttcctctgctgccatgttaatccatcaggaagtgctcccacagctttgtagttggccatatcagcgaaccaaggggcacttgcaacagccatcatttgctcgtcaggaaatgcatcattaatctccagctgtggactatcttggagttctttctcttggattcttgataagtggtcagccactatgttttctacacccgctttgtctttaatttccaagtcaaattcttgaaataggagcatctacctcaacaagcgtggcttggcatcctgcttagtcaacaagtacttcaaggcagcatggtcagtgtaaacaataactttagacccaatcaagtaagaacgaaacttgtccaaggcataaactactgctagcatttctttttctgtggtagcatagtaaatgacatgcaacaatttgttcttgcgttggcctaaaacagctcctatagcatattgactagcatcacacataagctcaaatggtaaactccaatcaggggcagtcaaaacaggtgcagtggtcaatctctccttaagcacattaaaagcattcaaacaattagcatcaaagttaaattcagagtctttgaccaacaattggctaagaggcttagctattttagaaaaatctttaatgaatcgcctatagaaccccgcatgtcctagaaaactacgcacaccattcacattagcgggtggaggcaatttttcaatcaataaaagcttagcctcatcaacctcaatccccttagaggagattttgtgacccaaaacaataccatcacgtaccctgaaatggcacttttcccaattaagaacgaggttggtctcttgacacctctttaggactttagacaaattaatcaaacaagcatcaaaattagaaccaaatacagagaaatcatccataaacacctctaagaatttttcaaccatatcagagaaaatggatagcatacacctttgaaacgttgcgggagcattgcataaaccaaagggcatccttctgtaggcaaacactccaaatgggcaggtaaatgctatcttctcctggtcctcaggtgctaccggaatctagttgtaaccggagtatccatccaagaaacaataatactcatgtccggccaacctctctagcatctgatcaataaatggaagcgggaagtggtctttccttgtagcatcatttaaccggcggtaatctatgcacatccgccatccgatgatagtcctagtggggatcagatcattattatcattttgaattactgtgaccccacctttcttgggtacggtttgcaccggactaacccaagcggtatcagaaatcggataaatcatgcccgcatccagaagcttcaccacttcttttctgactacttccttcatcataggattaagccttctctggggttgcctagccggcttcacatcgtcctccattagaatcttgtgtgtgcaaaatgaaggattaatgcccttcacgtctgatatggaccatccaatggcggacttgtgctccttgagcaccttgataagcttggcttcttcctcctcagatagaccattattaatgatgacagggtaggtcttgtcttcccccaagaatacatacttaaggactgctggtaactccttcaactccagctttggagccccatggtcaaggtcagtttccttcttttctaacacctccactgctgcttcttgtacttcctcaatgacagccacatcttgagcctccattatctcttcaagttcttgctcaggagactcatctgtgtgaatcaaggcatctaacacatcaatccggaagcaatcattcttatcaagaggaaccttcatagcatcaaagacattgaaaacaatagattcatcaaacatcctcagctccaatttcccttcagccacatcaatgatagctctagccgtagccaagaatggcctacctaaaagaacaggtatctccccctcttccatatccagaactataaaatcagcagggaaaatgaatttatccaccttgaccagaatatcttcaatgaacctactaggtctcctcaaggatctatcagccaattgcagagataccctggtaggtttcaactcagaaatgcccaatgatttgtgatgagtcactatttagcactatttactcatctttctgtactcattttaatccctagttgtgtttaaatgtttatattttgcactgtttctcgattaggacttaattggaccgataattcagattttaattaatttggattattttaagtttaattattctaatttgatttttcagggcagattaataattaattgggcttggaattaattcgtggacttgaagattgggatgccgcgcatcagcattttattttcgttttattttaatttccgttttaattgtattttcatttttgggccaaaactgttaaaaagcccattttcgtttttttagacagtctctatttatattgggaactgtgcccatgcagaggaggctcagcttattttcgtttttagggtttagagcattttcgttttctctgtttcttctcttggggttttcgtttctgctgagcactctgaattacgtttctgttggaattttaatttgggaatataatttcgcttttgcttctgcttgtttcttctaatttcgtctctgtttctgctccttctatttcgtttctgtttctgtaatttcgttttctgcttagggtttcaatttcgttctgtgtttattgaatttcgttttctgtttagggtttaatgttcagtttcgttttcatttgtgtttctgttgctatttttgaattaatggaaggctaaaccctagagttgaaccctaaacagattgcatacctttaatggaggttcctgtgttgaatttcgtattctgcttgattcgttcttgttagggtttctgtctgtaattttcgaattaggatcatgcttaatgattctgagttgattaatgcagtaatctcagtttgcttaattctgagagtttgcctaacgaggttcacgtttgcttaattcgtggaatgacgttttaggttaatcttcgcttagtcgattaatctggactgatgagaattaagtagaacagattatccttcgtgaaccgaggaatttagaggcgcaatctgtttctagggtttgactcgtttttaatcactgcaattaatttgtgtttctgtttagtttagttttcgaattctgttttaaatatcgcattctgccacaaaaaccccccttgcacgtttaatcccttaaacatagacaattggtccttgagagacgacctaggagtcacttcctagtactacacttaatctgaattaatttggttgcgtacggccgcgatcaaattttggcgccgttgccggggatcattagctctgtttaagggttctgtgtttgtgtgtgtgtgttagtgttagtgttagtgttgttgttgtttttggtttctgttctgtgattattgatcattgctgcaagtggcagaggcaaagtagcattcgagttttggtttctgatttctgttctaagaatttcactttgatcaccaatggaacagtaactcgaattgtgcttgtttctgttgtccataccagtcgcatatcagattttacttttaggtgtggtttgatatatttgtgctttgagccttttgtttcttgcatatttggttgtgttgatcacttttgcaggtccaattgatacattgagcaaggaattcgagcatcaggaagcagccaggaagctagcagtcgcaatgaacagtgcaatgaacagtgccatgcatgaacagtaaccaatttttctgaattaattgtgattttttgttttgatagctagacttgttatttttgcttgaatttttgtgtggtaacttcttttagattatatttgttaggaaaaataccaaaaacatttaaagtactacagattctgagatacaaaaatttgggattcatttttttgtcaaaacttaaaactgccataactttcaatccgaccgtcagaatttgacgtattatacatgttttttaggtagaaaaaaaagatctatccaacccagtctgctttgttgtctggcgaccgtcggatcttcaaaaaaaggccgttttctattttatttttatttttgaagttttatttccctatttttccatatttgcttagtctgtttcaattagttatcctttgaattaggtcttgaaatttggtatgctatcttttcatgattttagggtgttgctcaccaaattttagctcatttggacttcgtttgcctgtagctctagttttacctctctttgtgcttgtctgccaaatgcttgatatgttgcttgtagtgcatgactagaggcaatccaggagaccttcaaccctttgatcctgagatagacaggacttaccatagattagttaggcattttaggaatatttcattagattctgtaaccttagataatgttagcttgaattctgagtattctccttctgctactagctttaattctgtgcatactatttctgattctgctgattatactgagaataatatggctcaacctccacctcgtgagaggactcttagggagctggctgcacctgatttcacttatgagagtttgtgcatctagtatcctgatgaggatgttccgtatgttctcaaaactggactgatacacttgctgcctaagtttcatggtcatgcaggagagtgtcctcataagcatctgaaggaattccatattgtctgttcaaccatgaaacctccagatgtccctgaagatcacattttcctgaaggcatttccacattcattagagggagtggcaaaggactggttatactaccttgctcctagatcaatcactggttgggatgatctgaagaaaatgtttcaggaaaaatttttccctgaatctaggactactgccatcaggaaggatatttctggcatcaggcagcttggtggagaaagtttgtatgagtactgggagagattcaaaaagttgtgtgcaagttgtccacaccaccagatttctgagcagcttcttctccaatatttctatgaaggtcttaacagcatggagaggagtatgattgatgctgccagtggtggggcacttggtgatatgactcctgcagaagccaggcatttgatagagaagatggcttccaactcccagcagttcagtgcaaggaatgatgctattgttattcgtggagttcatgatgtggctgccaattcttcttcatctgtagccacgaaactagagggcaagttggatgctttggtgaatttagtgactcagcttgctgtcaaccagaagtctgcctcagttgccagagtttgtggtatctgcacttccagtgagcattatactgatgcatgtccttctctgcagcaccctgttagccctgatgctcctcaagcctattctgcaaacatctataacaataggcctcaacagcaacaacagcagaattatgatctgtccagtaacagatataatccaggatggagaaatcatcctaacctcagatggtcaaacaaccagcatcagcagcagcctccagttccaccatttcaaggttctgctggcccaactagaccatatgtgcctccaccaatccaacagcagcagtaccagaggcaacaacaagatgttcctgtaccaccagcccctcaaccttccacttctgaaccttcactggaggagctggtgagacagatgaccttgcaaaacttgcaattccagcaagagacccgagcttccatccagagtctgactaaccagatggggcagatggccactcaactcaatcaggcacagtcacagaattctgatagacttccttctcagactgtgcagaatccgaaaaatgttagtgccatcacattgaggtcggggaagcagattaacatacctatcccacctccatccataccagttcctacccctgcacctgtgccaatgcctgagcaaagtgatgaccaaaattgtgcagatggaccttcttccagcaccagttctgatgtgccgcagcagcctcctatccctcttccattccctcctagatcaattccaaacaaaaagatggaagaggtggataaggagatattggagatcttcaagaaagtagaagtcaacatacctctgcttgatgccatcaagcacattccgaagtatgcaaaattcttgaaggagctgtgcactaataagaggaagaggaagatgactggaattgagagagtcagcataggcagaaatgtttcttctatgacaggtaattctgttccaaacttgcctgaaaaatgtgaggatccaggtacttttagcataccttgtattattggtagtaataaatttgatagagctatgcttgacttgggtgcctccataaatgttatgcctctgtccatttttaaatctatgtctcttggtcctttgcaacccactggtgtagtgatacaattagcaaataggagtgttgcataccctacaggtttcattgaggatgtcttagttagggttggtgaattaatttttcctgctgatttttatgtgcttgatatggaggagggattttcccatggttctgtccccctcattctaggtaggccatttatgaaaacagcccgaactaagatagatgtgtatgctggtacattgactatggagtttggagatattgttgttcattttaacattcttgatgccatgaaacatccatctgaaaatcattctgtcttccgtgctgagattcttgatgatgttgttgatgagtatatttctgatttttattcttcccatgctacaaagcaatgttttctatctgatctttatacttctcttgcatgcatggaatctgaatatgaatctgataatgaatccagctttgattttcaatctgaacatatgtctcattttgatgttgatgttagttctgagattaattctgatgtattgggtgttgtacctctggataataactttttagagtcagaatgcactaaccatgttttaggaagtacacaagaatctgacttgcaggttgaggtacaggctgtggaacccattcttcttccatctctggttccttcttctgatcagcccacccccattccagaattaaaacctctaccagaaaacctcaagtatgcctacttggataatgatgagaggttaccagtgatcatttccacttcctttgatgctgatcaagaggacaagctgttgcaagttctgaaaaaacgtaagaaagccatcggatggaccctggcagacatatctggtattagcccatccacttgcatgcatagaatatcattggaggatggagctaaacctgtgagacaaccacaaaggagactcaacccggtgattctggatgtagtgaagaaggaggtgaccaagcttcttcaggctgggatcatttatcctatctctgacagtcagtgggtgagtccagtccaggtggtcccaaagaagacaggcctcactgttgtgaagaatgacaaggatgagctcatcccaactagagtgcaaaacagttggagggtctgcattgattaccgaaggctgaaccaagcaacacggaaagatcattttccgttgccattcattgaccagatgcttgagcgtctggcaggtaaatctcactactgttttcttgatggtttttctggttatttccaaatccatattgctcctgaggatcaggagaaaaccatattcacctgcccctttggcacttttgcctataggaggatgccttttggcctgtgtaatgcccctggtaccttccagcggtgcatgctgagcatattttctgattttcttgagaattgcatagaggtgtttatggatgatttcactgtatatggatcttcttttgacatgtgtttagatagtctggataaagtgcttaatagatgcattgaaactaaccttgtcttgaattttgagaaatgccatttcatggtagaacagggaatagttttagggcatgtcatttctagtaagggcatagaggtagatcctgcaaaggtatctgttatttcacatctgccttacccctcttgcgagcgagaggttcgttcttttcttggccatgcaggtttctataggcgctttatcagagatttcagtaagaaggcccttccgctatccaatttgctgcaaaaagatgtggatttcaattttgatgatagcagtaagaaggcgtttgaccaccttaaggaagcattgaccactactcctatcctctaggcacttgactggacagtcccatttgaattaatgtgtgatgcatcaaactatgcattgggagctgtcctggcacagaaagttgataagctgcctagagtgatctattatgcttccaggactttggatgctacccaagcaaactacaccacaactgagaaagagcttcttgccattgtgtttgctcttgataaatttagatcatatttgcttggttctcctgttattgtttatactgaccatgcagctctaaagtacctgttgaaaaagactgactccaagcctagactgatcagatggatgctcttgctccaagaatttgatttggatatccgtgataggagtggagctcagaatttggtagcagaccatctcagcagaattgaaggagctgagaatagtaatgaaatgttgcccatccaggataattttcctgatgaaaatcttttgactgtttctactgtttctgtttctaattccaccccttggtttgctaatattgtgaattacttagttgcttctgtttttcctcccttggcatcaagagctcaaattgataaattaaagagtgatgccaagcattatatttgggatgacccctatctgtggaagttgtgcagtgaccaggtgattaggagatgcataccagatcatgagatcaattcggtcttgcagttctgtcattcctccgcaccaggtggccatctcggtatacagaggacagctcgcaaggttcttgnnnnnnnnnnnnnnnnnnnnnnnnnnnnnnnnnnnnnnnnnnnnnnnnnnnnnnnnnnnnnnnnnnnnnnnnnnnnnnnnnnnnnnnnnnnnnnnnnnnnnnnnnnnnnnnnnnnnnnnnnnnnnnnnnnnnnnnnnnnnnnnnnnnnnnnnnnnnnnnnnnnnnnnnnnnnnnnnnnnnnnnnnnnnnnnnnnnnnnnnnnnnnnnnnnnnnnnnnnnnnnnnnnnnnnnnnnnnnnnnnnnnnnnnnnnnnnnnnnnnnnnnnnnnnnnnnnnnnnnnnnnnnnnnnnnnnnnnnnnnnnnnnnnnnnnnnnnnnnnnnnnnnnnnnnnnnnnnnnnnnnnnnnnnnnnnnnnnnnnnnnnnnnnnnnnnnnnnnnnnnnnnnnnnnnnnnnnnnnnnnnnnnnnnnnnnnnnnnnnnnnnnnnnnnnnnnnnnnnnnnnnnnnnnnnnnnnnnnnnnnnnnnnnnnnnnnnnnnnnnnnnnnnnnnnnnnnnnnnnnnnnnnnnnnnnnnnnnnnnnnnnnnnnnnnnnnnnnnnnnnnnnnnnnnnnnnnnnnnnnnnnnnnnnnnnnnnnnnnnnnnnnnnnnnnnnnnnnnnnnnnnnnnnnnnnnnnnnnnnnnnnnnnnnnnnnnnnnnnnnnnnnnnnnnnnnnnnnnnnnnnnnnnnnnnnnnnnnnnnnnnnnnnnnnnnnnnnnnnnnnnnnnnnnnnnnnnnnnnnnnnnnnnnnnnnnnnnnnnnnnnnnnnnnnnnnnnnnnnnnnnnnnnnnnnnnnnnnnnnnnnnnnnnnnnnnnnnnnnnnnnnnnnnnnnnnnnnnnnnnnnnnnnnnnnnnnnnnnnnnnnnnnnnnnnnnnnnnnnnnnnnnnnnnnnnnnnnnnnnnnnnnnnnnnnnnnnnnnnnnnnnnnnnnnnnnnnnnnnnnnnnnnnnnnnnnnnnnnnnnnnnnnnnnnnnnnnnnnnnnnnnnnnnnnnnnnnnnnnnnnnnnnnnnnnnnnnnnnnnnnnnnnnnnnnnnnnnnnnnnnnnnnnnnnnnnnnnnnnnnnnnnnnnnnnnnnnnnnnnnnnnnnnnnnnnnnnnnnnnnnnnnnnnnnnnnnnnnnnnnnnnnnnnnnnnnnnnnnnnnnnnnnnnnnnnnnnnnnnnnnnnnnnnnnnnnnnnnnnnnnnnnnnnnnnnnnnnnnnnnnnnnnnnnnnnnnnnnnnnnnnnnnnnnnnnnnnnnnnnnnnnnnnnnnnnnnnnnnnnnnnnnnnnnnnnnnnnnnnnnnnnnnnnnnnnnnnnnnnnnnnnnnnnnnnnnnnnnnnnnnnnnnnnnnnnnnnnnnnnnnnnnnnnnnnnnnnnnnnnnnnnnnnnnnnnnnnnnnnnnnnnnnnnnnnnnnnnnnnnnnnnnnnnnnnnnnnnnnnnnnnnnnnnnnnnnnnnnnnnnnnnnnnnnnnnnnnnnnnnnnnnnnnnnnnnnnnnnnnnnnnnnnnnnnnnnnnnnnnnnnnnnnnnnnnnnnnnnnnnnnnnnnnnnnnnnnnnnnnnnnnnnnnnnnnnnnnnnnnnnnnnnnnnnnnnnnnnnnnnnnnnnnnnnnnnnnnnnnnnnnnnnnnnnnnnnnnnnnnnnnnnnnnnnnnnnnnnnnnnnnnnnnnnnnnnnnnnnnnnnnnnnnnnnnnnnnnnnnnnnnnnnnnnnnnnnnnnnnnnnnnnnnnnnnnnnnnnnnnnnnnnnnnnnnnnnnnnnnnnnnnnnnnnnnnnnnnnnnnnnnnnnnnnnnnnnnnnnnnnnnnnnnnnnnnnnnnnnnnnnnnnnnnnnnnnnnnnnnnnnnnnnnnnnnnnnnnnnnnnnnnnnnnnnnnnnnnnnnnnnnnnnnnnnnnnnnnnnnnnnnnnnnnnnnnnnnnnnnnnnnnnnnnnnnnnnnnnnnnnnnnnnnnnnnnnnnnnnnnnnnnnnnnnnnnnnnnnnnnnnnnnnnnnnnnnnnnnnnnnnnnnnnnnnnnnnnnnnnnnnnnnnnnnnnnnnnnnnnnnnnnnnnnnnnnnnnnnnnnnnnnnnnnnnnnnnnnnnnnnnnnnnnnnnnnnnnnnnnnnnnnnnnnnnnnnnnnnnnnnnnnnnnnnnnnnnnnnnnnnnnnnnnnnnnnnnnnnnnnnnnnnnnnnnnnnnnnnnnnnnnnnnnnnnnnnnnnnnnnnnnnnnnnnnnnnnnnnnnnnnnnnnnnnnnnnnnnnnnnnnnnnnnnnnnnnnnnnnnnnnnnnnnnnnnnnnnnnnnnnnnnnnnnnnnnnnnnnnnnnnnnnnnnnnnnnnnnnnnnnnnnnnnnnnnnnnnnnnnnnnnnnnnnnnnnnnnnnnnnnnnnnnnnnnnnnnnnnnnnnnnnnnnnnnnnnnnnnnnnnnnnnnnnnnnnnnnnnnnnnnnnnnnnnnnnnnnnnnnnnnnnnnnnnnnnnnnnnnnnnnnnnnnnnnnnnnnnnnnaaaaaaaaaaaaaaaagagagaagaagaagaaaaataaaagaaagagaaaaagaaaaaaatatagaaatgaaagaaaaaaataataaattgaagaaaagctgttttgtttgaagcaaaggaaaaggaatgatgttagaggctgattagagatttttgggtttgttgttgtgcttacttcatacttattccccattgctcctctggtccctctggtttgcagctacttattccatattttatcctctcccatgtccttggccacattacaaccttgaaaagaccttttgatccttatgtgcatgtttattgggtgttaattatagaggcttgccaagtctatctgttgcttgttttcatgagtatttgagagtatacagttgcctaaacatttgagagatacagtgtgtgatacagtgcatctggtgaggttctgttgcttttaattcacctcttgagcggattaattgttttgataagttttgaatgcttggatgaatctcataagtgtgtagtttctctgactctttgtgtgttggaaatagtcaattcctttctctttcccagttttcattgaggactgtgcataactgattgttttatggtgtgtcatactttctttaaagtttttagaatttttccttgctctatttctttgattttgcccaggagtgcaaaaggctaagtatggggggttttgatgagtcactatttagcactatttactcatctttctgtactcattttaatccctagttgtgtttaaatgtttatattttgcattgtttctcgattaggacttaattggaccgataattcatattttaattaatttggattattttaagtttaattattctaatttgatttttcagggcagattaataattaattgggcttggaattaattcgtggacttgaagattgggatgccgcgcatcagcattttattttcgttttattttaatttccgttttaattgtattttcatttttgggccaaaactgttaaaaagcccattttcgtttttttagacagtctctatttatattgggaactgtgcccatgcagaggaggctcagcttattttcgtttttagggtttagagcattttcgttttctctgtttcttctcttggggttttcgtttctgctaagcactctgatgttggaattttaatttgggaatacaatttcgcttttgcttctgcttgtttcttctaatttcgtctctgtttctgctccttctatttcgtttctgtttctgtaatttcgttttctgcttagggtttcaatttcgttctgtgtttattgaatttcgttttctgtttagggtttaatgttcagtttcgttttcatttgtgtttctgttgctattttcgaattaatggaaggctaaaccctagagttgaaccctaaacagattgcatacctttaatggaggttcctgtgttgaatttcgtattctgcttgattcgttcttgttagggtttctgtctgtaattttcgaattaggatcatgcttaatgattctgagttgattaatgcagtaatctcagtttgcttaattctgagagtttgcctaacgaggttcacgtttgcttaattcgtggaatgacgttttaggttaatcttcgcttagtcgattaatctggactgatgagaattaagtagaacagattatccttcgtgaaccgaggaatttagaggcgcaatctgtttctagggtttgactcgtttttaatcactgcaattaatttgtgtttctgtttagtttagtttttgaattctgttttaaatatcgcattctgccacaaaaaccccccttgcacgtttaatcccttaaacatagacaattggtccttgagagacgacctaggagtcacttcctagtactacacttaatctgaattaatttggttgcgtacggccgcgatcaatttgcatattgaaagaggcatcaagttgatacttgcaccaaggtcacataaagctttgcccacattaacattacctatggcaataggtatgttaaaacttcctggatcctggagtttaggtggaacacgactctggatgatggcactgcactcttcagtcaagaccattgtctcacattcttgcagcttgtgctttttagataacaagtccttcataaacttggcataatttggcatattggccaaggcttcagcaaaagggatgttaacttgcagcttcttaaacatttccaggaacttggcatattgctttttctgtgcttgctgcttcatcttcagagggtaaggtggtttttcaaatctggaaaaatccagaggcttcttaggttcagctgagatgtttgctttccctttctcttgctctttttcctttgagctgatagatggttcttctccaggttgtgcaacagctggtggagtctctttttccttctcttctctatgcaccactttggtcttctccttaggagcaataacaattccactcctagtggtgatagctttggcatgttccctaggatttaccactgtgtcgctagggaattgcccgggtgatctttctgctagttgtttcgagatttggcctatctgagtctccaaatttctgatggaagcacattggtttttcaattgagacctagtctcattcatgaaggcatcagtgttttggatatgatcgttagtggttttggccagctgcaacatagctttttccaactccgatggctccttgggagggatgggcggcggttgtaagtagtggttagatttgtaatccaacccacctccatgtgttcttcttggatagctacttccactcccagaggcttgattgtagtttatttgataaccttgtggtggcctttggtcataccatactccgttcacctgaattgggtcggcccccaccaaggttggacaaacattggactcatggtccccttggcagtgctcacatacagccacgcctgctctgattggtgaagcttgagctttggagacctctagcttgtcaatcttagcattgaggatggctagctgctgtgataggagtttttgttcagccaacattgcgtctgtgctgcccaaatgtataacttccctctttggctgacttgcaatactctcattctctgttctggccaaagagtctatcaggtcatgtgtttgggctgctgtctttgatctgatggagcctccggctgctccgtttagtaccagctttgattccggtgacaaaccattaaagaagattcgcaccttcttccccattggcatatcgtattggggacaccgccggattaactcttgaaaccgattccatgccgcacaaagagtttctccatggagctatgtgaagttggtgatctcattcaccaggcgattatacttctccatagaaaaatactgagcaaagaaccttgccatcaattcatcccaggtggttatgctgttagagggctgacggcctaaccatctgagtgccttcccttcaaagcaaaaggaaataggcgtagtcaaatagcatcatctgttactccttgattgcggatggtatcacagatcatcataaagcgttcagcaaagtcatgaggatcctcatcgtcctcaccaccgaattgattcttctccaccaagctgataagggatgggtggatgtcgaaatgattggcttgaataggcggcctgacaatgctggaggctggtcgggcgaacaatggagcaaggatattctccataagttcgtcctccggccttggctgctcgttgtgttactcagccatatctggatcctcttctgagtcttcttcctcttgcggtcgagaaccagatacttctgcttccttcctctgcctcgctaacctctgatttcttctaatagttctcgcaatctcgggatcaaactgaagattcgcggggttagtggtaccttgcataaactctggaaacaggtcagtaacaaaataaatccaaccttaaagataaaaatttataatgaatttggcttaaacaatccccggcaacggcgccaaaaacttgttgcgtactcggcaagtgcaccggtcaataaagtgataagaagatatcgtttccacgaggattgtttgaccaattaaactataaattatatcaataagttggataacaaataaataatgaataagattgttgttgtgtatatggaataggcgaaattaaaaactaaatataaacatggatatatatggacaaactatggaggaagagaatgatatatgtggttgagtagctagggcaatccacaccaaatgctccctacccttgttcatgtattgtctactaccttcatcaagcctaagttactcaaatatgcatcttcatacaatgatagctaagccctacttccgtagtgttcttaaccctttaacccaccttaataccctaatcccttagtgatattggttaggtcaagcattaaatgatgcattaaatggttgcaagcatacactcctatccctagttaatgtaaagcttgtcactttacctaagtccaagcataaggccccaatattcctattgtaaaccccagctcttagtacccaactagagtgatcagttccagagagatagaacatgcattcaacaagataaagtgaaataacttggcattaatgaaagatagcatccaatacaatcccaaaagaggttacattcagtgcttagccctaactacaatgaagaactagccaaacctcataatgggtggctgtgttacaaaataaaatggcatacctagctaaagcaaggaagaagaagattgagaaaaccccacttgaaccttcactctccctaaaccctagctaaggcacccaagcttctaaaaccctattttgtgttgtgcctccctccaaaatcgtgcattcaatgccgagggttgaagcatttatagtggagcttgtgaagtctctgttttgcccttaaaatgctgcttctgtcgacctgtggcgcccttggcgcgagtttggcgctgacgacgccaacatgcagagtgaatggcgctccaagcgtgaacatggcccccaaagcgctggctggcagaaggtctggcgctcttagcacggaaactggcgctcctagtgcggaagtctagtgaaggtaacgctccaggcgccattctggcactctgggcgctgagtatcagatcttgtggcacccctggcgtggctgaggtgctcctggcgccagcatctagaataaatggcgctgggggcgcgactttggcgctctgagcgccaacttccagtgcttttggcgctcctggcgctacatatggcactgatggcgccatagctttctgcagacttggctcttttcttctgatttttgcttagtcttggcacttgtggtcactttcctagcaatttaacacattagctcaattcaccacacaaaaagggcaattatccatgcttaatgctcaattcttgctctaaaaaaaacttaggaaatccttatatgctaggcgcatatcagaagccattaggttattacttgcatatgcatgcttaatgaactttaaattgtttcaaatggatgttaaaagttcatttttaaatggctacattgatgaagaaatatatgttgatcagccccctggttttgttgatcacaaacatcctaaccatgttttcaagttaagaaatgctttgtatggtttgaaacaagcacctagatcttggtatgagaggttgataaaaccttattcatcaagaaaagagggattgatatattgttggttcaaatctatgtagatgacataattttttgttctactaatcaatctatgtgcaaagaattttcagtatcaatgctgagtgaatttgagatgtcaatgatgggggaactcacattctttctaggactacaagtcaagcaattaaagaatggaaatttccttagtcaatccaagtactgtcaagagatgataaagaagtttgaaatggagaaatgcaaggatgcttcaacacctatggcaacttctacctatcttgacaaagatgacaaaagcaaatgtgttgatgagtctaaatacagaggcatgattggatccttgttatgcctaactgcaagtaggcctgatattatgttgagtgtttgcatgtgtgctagatatcaagcaaatcccaaggaatcccatttaactgcagtcaagaggatcctcaagtatcttaagtctactccaagagttggactttggtatccaaaaggtacacctatcagcttgatttttgtccattaccaattagcaacttacaatatatatatatatatatatatatatatatatatatgtgtgtgtgtgtgtgtgtgtgtgtgtatttgttcttaccgagatctggaaattccacgtgtgggctagatgtggccttagtggactccaaattctgcacgtcggacggcgatttggctttgcttagaggagggacctgcaaaacaaaggaaaaacactctgacgctcaactaagtacatcaattgttaaagagtaactaagtgtgagaacccattataagatgtagagaatgagtagcttgagtaatgcattcaagtactgtgtaccgaaaggtagtgtgtttagagagaacctggatggttgtatttatagcgtggagtatgggccttgggccgttgtttattgataatctgttgataagatgataacaggtagttatctaattcaaatagaagatagtgtgtaccttattgatatattgttacttgtagataagtaataattagtagataacttgttgaaatgataaggtggttgcacctatttaaatatcctggcataatagatatgttgttgtggagaagataatattgttggtgtctgtgctcctgcagagggtcgtcgtccatgctcctatagcgatgttggcatggaatctggacacgtatgtccaggttgacacttggaggttgaataagcacctatttaatgtagcagtgctgacgtggagggtttccacgtgtacggtgacctttatgaaatagccacgtgtcattttactattttggactgtgcagtatttatgcgttgtttggtgaatgaatatcgtgaaaaaaaattaccaccgttttcataatcaaatatatagagctttctcttaaaattgaaattttgcgttttagagtagtgatatcgtagcgacaaagaaggtcattacattggtggtgaaagttggatccttaacttaggttggagatgaaaggtatagaggtgtctacttatattcgcaaggggatccaagtagaatatgatgtttagttgttcttgtctatgagtaagcaaataagttagtggtgctttgtattctaaacctagttaaggataaagataataatcactaagttgtatcttgtgagcgattgacgagggattatctaggtgctgcaatatatatatatattgtgaggaaatgcaacaaatgtattgccagggattagtgtgcgatttgcgaaggaaaacaatatatatattgtgagggaatgcaatagacatgttgcaacacgttagcaagggattagtgaagggatgcaattgatatattgtgaaggattcacaacggattagcatatgccttttgcgagcaattagtgaggctatggcgaaggattattgcaaggtttggcaagggattagcgaggagatttgcgaccaaacaacaaggaaatacagaggaactaataaaacaataatttgtaattagatagcgacaacgtaacaagggatatcttgcggctaggagctttgtaaggcattaacaagggaatagcaatgaaatttagcctgggataaatggaacttcctccgtgaggcaatagcgatgaattagaaaggacagagtgcaacaaattagcaacgtagttttcaagggaattggcaagggatttttgtccattgccaattagcaacttagatttagcgagtgaccattctgtcgctaaatggaatagccacttgagatatcaaaatctaatcttaaatatactgggcatacatcatctagactgtggggagagttgtaggtttgactaatgtctaggtgattcactattgtatttgcctaaaattgaacaattttttaatcaatatgtaggtagtgagaaaagaagaacattgttacaatcttgtcatatatttgtgtttcataagaattgtaaatatatgtatatgtagctacatgttgagttgttatggtattgtatcttgtgagggcctgtttgttgaagttgaacattgtcacatgaattttagagagaatgtgtttttcagaattataaaattagtagttggctttgtagccttacaatatagaaaacaagaaataataactaatccacgtacataaataataggaatttataatagactaataactcaaataacaaaacagaaaaagtataaacaactaattacaacattcccttctttaaactatatgcaaaaggcatttagtttaccactaaagtgtaacgaccaaaaattattctagatattatatttttattagggttgaatttttaagaattgttagataatttttttattactattttatttttactgaacggatcccaatataaattctaaaacatataaattataaaagttgttaaactgatatatgtaatacatagccacagtccttgtacaatagtcattttcaaggaaacataaagatactacaacactttcatcattcatttcctagagacaattctttatctttgtaccactatcagtccaaggcatcaaagaaattgaccactgttgccatctataaaaaaatgaaacaaatctagtgagaaatataatttctcagtaggcaaaactaaaccaccaaaacatgttagtacattagtaaatcatcataaaataattatgcaaactatatgaatgcatgaaataaatttttccatggtgcacatggcctcttaatatcgtactgtatgtagctacacctcgtactggatgtagacgctgcgatcatcttacacaaacatgcatgatttattccatgtatctgcacctggtcactacatatcgtactgtatatagcatcaaattttgtttcacaaatctcgtactggacttggaaatataaatcaacatatcatcaatcaaaatccattcataataaaatccataagcaaaatacataccaccttatggaaaaaaaatgttgttgtcataacatcatacgtaccacaagtatggttaaaccaccataccttgttcaggaaaaattataccaacttaggcatgaaaatttaatatcttcaggctacaaataaatcatgttagtagtctaactaataaatcacaatatatcttttaaataatttctaactcctttaaactttcacaagaaaattataaactagcatgcattttaatctccttttgtaaggaccctcattttttgaaccaggcttctccaagagaaaacctgattttaggtgtggcgcggatcgcgccagggttggcgctgatcgcgccagacccatctactatggcgctgatggcgccagagcggcgctgatcgcgccaaactctctggaagttggcgcctggagcgttaaggtggcgcgaggagcgccacagtttttccagttcgcgcggatagcgccatggaccgcgcggatcgcgtgggaagtggcctggaaaaccattttcctctggaatcccacgcggtcagcgccagaagccatgctgggggcgccatggaactggcgcggattgcgccagtgtggcgcggatcgcgccacaggttctggaggtcgacgccagtagcgcggggttggcgcggttagcgccagagtaccgccatggtggcgcgaatcgcgccagaggtggcgcggatcgcgccagacctcgggcaggctgagtatataagggcagatcgcgttttctgaagaagaaaacttcttcttcctccccacgccctggacctccattagagcagttccaagctttcttaaaccttatatactagcctaaacactttccggtgagttgtaaacttaagagaaccgattagaaagctaaaatccttcatcaatttctcttgagaccccattttgagtgagaagagaaaagctcagagaacttgagagtggcagagacccaaggcgggaaacggacactggagcctgaggaagctgttttgaggtcttctgagtcgccactgaggtaagagactcaagtttcttcggttaattttgaatttgagggtctctatgaatagtgacccatatgagctggggctagaattggcccagggtcctgtagagaaaattgttcagagcagagtagggatgaaggattagctttcagtttttgattctgataactttgagttttggctctgtgacctgtatgtgtggcctgtctaaggaatcaattgtgagatttaggccattccagagccttgattatgtctgttatgagcctgtgaggctagttgaatgagacttcgagtggaactcagtccgttctagtgataattgagtataaggctgaggaaacctatgccatatgcatctgtattgagtctgagatgactctgaggcttggctttcagccttgagggacttggtgtggtctgtgaacagtccagtgtgggctgagttggtttgaaccctaggataggggaattttgatatattatgttttgtactggaatgcctgttggcttgatcttgatatgaaattgtatgtgccttgattaggcattgattgtgagattgttggtggtgggagccacagaccagggaaggaaccgcagggtgatcatttgtcaggtaagttcagtgtttctagggatgaattcccgttttggttgcacaccacactcctggggagtgttggtcatgattcatgatacatatattggttgttgcattgatatgttatatggtgtgcatctgtattggatgattatatgttgtgattgaggtatagctattggccaataggtaaaatactggcattgagggttctctgccaagtgtataggcgttgagggttctccgccaggcattgagggattctctgtcgagggtttaggcgttgagggttctccgccatgcattgagggattctctgcccagtgtattgagcagatagctgctctgtgatgtaataagggccagagggccaggctaatgagccagattgtgtgtgattgcctgatgtgtgtattgtgaatctgtgagccagggtgggaatgatttcccagggaccctgagcttactgagatatgttatctcaccccgtgtggggattctatgatttcaggtgacccttctggaagagaagatcagtctcagggcaggaggcccagcagagacatggctgcttgactgaggagcagcaaggagagctgagagctcatttttggttttgattatgtcatgtacccttgataagggacagggtgtgtgtaccctgtattatgtacagttctgtataccctcgatgagggctgatattcttttgtatcaccacggtatggtgaggactgttatgtatatgtctgtacagaactgatgatgatgtatgtatatgatgtccctctgagtataactgatgtttatttggttatctgcgtatgtatattattgttcgaaaaactggatcagcaggggtgtgatttatatgattctgcatgtgttttctttgtgatatgcgtattccatacacaatgaatcaagaaaaatgattctgtgtttccgctgtcttatttacatgttttaagcgctcatctgatattattaatgataacgcaccggaggcctacggggtgttacatttaatggtatcagagcaggttcttgattcgaatattatgtatggaattgattggtgcttgttatgatagattaacatgagcattgcatgggggtacattaactgtgggcctgatcaactcactgtttgatgtacatgtgtcagtgccatggtgagacctagaagcacccgtaaggctaccaatgcccagtctgatccagttgcggcagccctagccgctatgcagcaagagttggctgctaatagatagatacaggcagatatgcagcaagagacggctgcaaacagacagactcagggggagatgcagcgggagatggctgcaaccagagaggtgaatgaagccttgatgaaggctaatcatgatctgcttgaggagctgaagaacctcaggaggaatgatagagactcctccacacctcctgctcatgagggcgaggcgagtcgccagccggttggtgggagtcaccagagaggggacctgatgtcccagatagaggctgacagtgatgtagcagccagagggaagatgctgattacattcaggaagcatgaccctccagtgttctcgggaggctatgatcccgtggctgcagcagggtggctgcaagctttagagaagattttcgaggtcatggagtgccccgatcaccagaggttgctgtatgcaacctacatgcttcagggtgacgcccacaagtggtggaagaccactgttcctcttctgagaggccggggagaggagattacctggcagttgttcgaggcctgcttcctcgatagatattttcccagagaggcgcgggagcagaagcaggctgagtttgatggtctcgtccaggggagcatgacggtggacgagtatctggcccagtttaatgaactggcccagtatgcacactttaggagacctatgcctgaagctgagacattagcagctaagttcctgagggggcttagagatgacattcaggtgctggtggccggtcttgggtcacgagatatggataccctggtgagacagagtcgccaggtggagggtatcctacaaagacagcagaggggcggacagcctactccctcagccagacaggagggaagaaggcctagcggttctggcccacccgggaagggtaagggcaggatgttgagagtttctgcaccctctgacagattcaagaggggttcagctcggggaagacctatcccgaagtgttcagcctgtggaaaggagcatttgggagcatgttctacaggccagatcatctgttacagatgtggcaagtcaggccacatatccagagagtgccatcagacagagagacgggcacaggctgctccagtggtctgtgaacagtccagtgtgggctgagttggtttgaaccctaggataggggaattttgatatattatgttttgtactggaatgcctgttggcttgatcttgatatgaaattgtatgtgccttgattaggccttgattgtgagattgttggtggcaggagccacagaccagggaaggaaccgcagggtgatcatttgtcaagtaagttcagtgtttctggggatgaattcccgttttggttgcacaccacactcctggggatgacggcacccacagcaggacgggtgtataccatggatgccagagaagcggccagagctccagatttgatcagaggtacagttctgatcgatgattgtgatgttaaagtattatttgattctggagccacacattccttcatacaggatgtgattgttgagaggctgggattgcataagattagtgttacccctccgatggaggttaccacggcatccagagaaagatgtcgggtgagcacgtgttgtaaggacgtgcagtttatctatgaaggcagagcttatgtgattgacttgttttgtctagcgatgcctacccttgagatgattctgggtatggattggatggccaagtatggcgtgatgctagactgttgtcagaagagggttgtcgtgccttctgacaagacaggattgagctccacagcattcttatcagtcttgcaagcccgtaaggcaatcagggagggagctcagggctatatcttcttgggtgtgacagaagataagccaggtgttgatttgtctcagatccctgtggtgagcgagtttggggatgtttttcctgaggagataactcagctaccaccagagagggaaatagagttctccattgatttggttcctggtgtgggacccatctctgtggcaccttaccgtatggctcctctggagttgagggagctgaaggtgcagttggaggacctgctgtccaagcagttcatcagaccgagtgtctcgccttggggagcactggtgatctttgtgaagaaaaaggacggcagtatgagactttgtgtggactacaggcagttgaataaggttactgtgaagaacaagtatcctctgcctcgtattgatgatctgttagatcagctgaggggagccagagtgttctccaagatagacctgagatccggatatcatcagattcgaatcaagcctgcagacatacctaagacagccttccggtctaggtatggtcactttgagtatcaggtcattccgttcggtctgacgaatgccccagcagtgttcatggattatatgaacagggtattcagacctttcctggatcagtttgtagtggtttttattgatgacatactgatctactccaagacggaggcagagcatgccgagcatctcaggacagtccttcagatcttgagggacaagcagctgtatgctaagctggacaagtgtgagttctggctgacagaggtgaagttccttggccatgtgatctcagccgctggtgtatcggtggatcccagcaagatagaggcagtgatgtcctgggagaggcccaaggacgtgtctgagatccggagtttcctgggattggctggctattatcggaggttcattcaggggttttcccagttggtggtacctctgactcgactcacacggaagggggttccttttgtctggacccatgagtgcgagcagtgctttcgggagttgaaggagcggttgaccacagctccagtgctgactcttcctgatcctgagggagtctttgaggtatattgtgatgcatccaagcggggacttggatgtgtgctgatgcaggatcagaaggttgttgcttatgcttctaggcaactgaaacctcatgaagagtcttaccttactcatgatctggagttggcagctgtggtgtttgctctgaagatatggaggcattatttgtatggtgccaagttgattgtcttcagtgaccacaagagtctcagatatctctttgatcagaaagagttgaatatgagacagaggcgttggatggagttcctgaaggattatgatttcgagctgagataccatccaggcaaggctaatgtggttgctgatgccttgagcaggaagaatgtgactgctgcatgcttgatgatctttgactgcaagttgatagagcaattcagagatatgcacctgacagtggcagaaggtgctcatggtcttgagatgagcaagaccaaggttgataatgagctgatcaggaggatccgagaagctcagcagcaggatgaggcagtaagggccatgattggccaataggatgtttcctgggaggatcaggacttggtgagataccaaggacgcattgtagtgcctaagggcgagttgagagatgtcgtcctgtctgaggcacatcagggccagttcagcattcatccgagagccaccaagatgtatcatgacctaaaaaggagtttctggtggccagggatgaagagggacatagctgaacatgtgaccaagtgcttagtgtgtcagaaggtgaagattgagcatcagaaaccgtctggtctacttcagcctttagagatccctgagtggaaatgggacagcatttccatggatttcgtggtagggctaccgaggactcagagtggttatgattccatctgggtgattgtagacagactgactaagtctgctcacttcttgccggtaagatctgactacactacagagaagttggcccagttatatgtcagggagattgtgagactacatggagtccctgacagtatcatcagtgatagagattcaaagttcacatcaaggttctggggtgcacttcaggatgcttttggaacccagctcagactcagcacagcttaccatcctcagacagatggtcagacagagaggaccatccagactctggaggatatgctgagagcatgtgctttggagcaaggtgctagctgggacagatatctacctctggtggagttctcttacaacaacagttatcatgccagcttgggcatggcaccatatgaggccttgtatggccgacggtgcagaactccagtgtgttggacagaggtaggggagaagcagctccttggacctgagatggttcaagagacctctgagcagatcaagatgatcagagacaagttgatgaaggctcagagtcgacagaggagctattatgatcagaagcacagacctctgcagtttgatgagggtgatcatgtgtttctgagattatcaccagtgacgggcgtaggacgagctgtaggggtgaggaagctgagtcctaggttcattggtccatatcagatcctggagaggataggaccagtagcatacaggctagctttgcctccccagttgtcaggtttacatgacgtattccacgtatctcagttgaggaagtatgtagcgaatccctcacacgtggtagaacctgacacggtgcagatcagagagaatctgacgagtcctacacgacctctgagggttttggacaggatggagaagcagatccgcaacaagatgattcccatcgtcaaggttcaatgggaaggcagaacacctgaggaagcgacttgggagcgggagcaggagctgttgcagatgtatcccgagttgattaacagatatgtttctgaattttgcggacaaatttcctaaaaaggagaggtgaatgtaaggaccctcattttttgaaccaggcttctccaagagaaaacctgattttaggtgtggcgcggatcgcgccagacccatctactgtggcgctgatggcgccagagcagcgttgatcgcgccaaactctctggaagttggcacctgaagcgtcaaggtggcgcgaggagcgccacagtttttccagttcgagcggatagcgccatggaccgcgcggatcgcgtgggaagtggcctggaaaaccattttcctctggaatcccacgcggtcagcgccagaagccacgctgggggcgccatggaactggcgcggattgcgccagtgtggcgcggatcgcgccacaggttctggaggtcgacgccagtagcgcggggttggcgcggttagcgccagagtaccgccatggtggcgcggatcgcgccagacctcgggtaggctgagtatataagggcagatcgcattttctgaagaagaaaacttcttcttcttcctccccacgccctggacctccattagagcagttccaagctttcttaaaccttatatactagcctaaacactttccggtgagttgtaaacttaagagaaccgattagaaagctaaaatccttcatcaatttctcttgagaccccattttgagtgagaagagaaaagctcagagaacttgacagtggtggagacccaaggccggaaacggacactggagcctgaggaagctgttttgaggtcttctgagtcgccactgaggtaagagactcaagtttctccggttaattttgaatttgagggtctctatgaatagtgacccatatgagctggggctagaattggcccagggtcctgtagagaaaattgttcagagcagagtaggaatgaaggattagctttcagtttttgattctgataactttgagttttggctctgtgacctgtatgtggggcctgtctaaggaatcaattgttagatttaggccattccagagccttgattatgtctgttatgagcctgtgaggctagttgaacgagacttcgagtggaactcagtccgttctagtgataattgagtataaggctgaggaaacctatgccatatgcatctgtattgagtctgagatgactctgaggcttggctttcagccttgagggacttggtgtggtctgtgaatagtccagtgtgggctgagttggtttgaatcctaggataggggaattttgatatattatgttttgtactggaatgcctgttggcttgatcttgatatgaaattgtatgtgccttgattaggccttgattgtgagattgttggtggcgggagccacagaccagggaaggaaccgcagggtgatcatttgtcaggtaagttcagtgtttctggggatgaattcccgttttggttgcacaccacactcctggggagtgttggtcatgattcatgatgcatatattggctgttgcattgatatgttatatggtgtgcatctatattggatgattatatgctgtgattgaggtatagctattggccaataggtaaaatactggcattgagggttctctgccaagtgtataggcgttgagggttctccgccaggcattgagggattctctgccgagtgtttaggcgttgagggttctccgccaggcattgagggattctctgcccagtgtattgagcagatagctgctctgtgatgtaataagggccagagggccaggctaatgagccagattgtgtgtgattgcctgatgtgtgtattgtgaatctgtgagccagggtgggaatgatttcccagggaccctgagcttactgagatatgttatctcaccccgtgtggggattctatgatttcaggtgacccttctggaagagaagatcagtctcagggcaggaggcccagcagagacatggctgcttgactgaggagcagcaaggagagctgagagctcatttttggttttgattatgtcatgtacccttgataagggacagggtgtgtgtaccctgtattatgtacagttctgtataccctcgatgaggactgatattcttttgtgtcaccacggtatggtgaggactgttatgtatatgtctgtacagaactgatgatgatgtatgtatatgatgtccctctgagtataactgatgtttatttggttatctgcctatgtatattattgtttgaaagactggatcagcaggggtgtgatttatatgattttgcatgtattttctttgtgatatgcgtattccatacataatgaatcaagaaaaacgattctgtgtttccgctgtcttatttacatgttttaagcgctcatctgatattattaatgataacgcaccggagggctacggggtgttacacctttcacctaccaccttactacttcattctcaaatttaattactcaagcatttaaaccatttatctacataccattcaacctctacttctaaaaattaattcaaaaagtaccataataaaactatgaacaaacagccaaaatatcatcaaaatcacttccaaagatcaccaaatatacttccaaacatcaccaatatttcagcctataaatcatcacctatcctatggtttaaatcaaaatttccatatcatagaataaccttcaaataacatgaattttcaacctaaacaataaccataaatcttcccaattaagcatataggttaatccaaacaaatgcttaactagagattgaagcctagcctacctcaattggatttggatttgaaattgattacttctcttggagatcctctaaggaatgaagtcttgaaaagaagaaaatttgatgtagaggtgaagctatagtttgaaagtaataagagaagataagaaatgaaaagctaggtgcaagaaaacaagtaaccgtgggatgagttttggtgctagtggtttatgaaaaaaacttggagcagcctagcaatttatactatgttaattggttcagattgaaggttttagttggactaaaaaaatggtttagaagttagtttagttagattctaactaggtaatcatttacctttagaagattttatgacttaagctttatcttgatttttctttgccaagattcttttaattataaacttgggagaagctggccttgtacgtggaattggctggaaatcttgatgtcctttgtcaaatttctacagttacacatatagccaagattcataaaaacatacaaatatcatagttacaccaatattttaatgtttaaggatagattcccttcattaatgaccatgtggttatgtggaaagcttggtacaaatgactaattgtgattggttctaaaatatttggctgaaactagattttcttttgcaagattccctcatttaatgcttgctttccaccttgaaggccacctagaaaggttggttcaaaaagcttatcttcattgacttaccattgattttggtttaccaaacttttcttcctattagttcacttagccatgcctattctatggtttttgcacgtgaatccacttctggataggccaaatttgagcttaatatttgattcctgggaccaaaatgtcaagagttacaagttgttcttaatccaaatgttacaaagggctagatatacttaactagatgggggtcactcattgtttgttctgtaccgatatactagttcaaaaattctcatcttctagtatgttaaactatacttcctaagctttctaacaaggtatcacatgcattatttggagttataaaactttggctataacatttttaatctagacttcaaaactgccagcaagctgaaaaattccacattgacatctcttaaggttttaattattgcaatcagtacacaaactatatttatctgaaattttaatatgttgtagtagacatcgtgatctttaatttcatacatcatacacttaatttggataataattgagaaagaaataaatttttcaattcgggtggtagatatggaagttttgggctgcttatgttcaaataaaatttatcctatttttcttgtatccaattatcatcctacttcaataattcaatcataaatataactcataatataattttgaggatgttacataaagcatcaaccattcctatcatactctgtaatttcaagaatttttctaacttcagaagctttgtcattatgtctgtaacctgatcttaagaattgcaatacctcaactgcacaactttatcattatattaatatgttttcttttgccgtgaaaaactggattcttagataactttatagtagagttattgtcacactgaatcaaagtactcttttcctctttatgagcaagtttctctaacacccttctcagccaaacacactaacaagcacaaaacacagtaactatgtactcatccttgattgtagacaatgtcactacaggttgtttcttagaagtccatgaaatttctccaaaaccaagtaagaaaacaaaaccagaagtacttctccgatcatccaaatcattagcaaaatcattgtcaacgtaagccaccagacttgtgcaaccgccttttttgtagaaaaatccaaggttaattgtacctttcaaatacattagtagtctttttactgcaagccaatgagatttagttggacaagacatgaatttactaataagactcactccatatatcaaataaagtcgaattgtagtcaagtacattagactgccaaccacctgttttaacaagggttcatcaactttggttctagcttcatcctttgacaactttatgcttaggtctataggattcttcacttaatttcttttatccattccaaaccttgctaaaatttcacgagcatactttctttgacacacaaatcagacgtatcaaattccgatatcattgaattcttaaaatcatcacacataaacacctgtcaaaaccttctagaaaaaaataagcttctatcttgctataccatggccttggtgcttgcttcaagccatacaatgcctttcttagcttgtaaattttcctttgttatcagattacgcgaatgcgttttacggcaagtgtaccgatcgtttaacaagtaataaaagggtaagtaaagtatcgtatccacagggattggaagtttttctcaataattataaagtttgtgattaaatgagaacaataaaatatgcaagagttgttggaagattgtattgaattaggtaaagaaataaaacaaaacagtaaattaaattcgaaagattaccgatgagaagtaattgtggtcaggcacaatcccttataagcattacctccttcaattgactgatgattttatctttaagtttacataagataagtctctcctaattttgtcaatcctagactcttaagagcattaactagtgatttcaccctttaattcgatcgagaaccctaaccttctagcgattctgtcaaactaagaagtcaaagaacaaatcttatgggttcgtgttatgtttattcgaagaataagtctttcctattttagctaatccctaatgtcttagtgaattaaccctttgaactgatttcataacctaatgtcttagtgaaactagtcaattcaagtaatcaaagaacatattataatctccgnnnnnnnnnnnnnnnnnnnnnnnnnnnnnnnnnnnnnnnnnnnnnnnnnnnnnnnnnnnnnnnnnnnnnnnnnnnnnnnnnnnnnnnnnnnnnnnnnnnnnnnnnnnnnnnnnnnnnnnnnnnnnnnnnnnnnnnnnnnnnnnnnnnnnnnnnnnnnnnnnnnnnnnnnnnnnnnnnnnnnnnnnnnnnnnnnnnnnnnnnnnnnnnnnnnnnnnnnnnnnnnnnnnnnnnnnnnnnnnnnnnnnnnnnnnnnnnnnnnnnnnnnnnnnnnnnnnnnnnnnnnnnnnnnnnnnnnnnnnnnnnnnnnnnnnnnnnnnnnnnnnnnnnnnnnnnnnnnnnnnnnnnnnnnnnnnnnnnnnnnnnnnnnnnnnnnnnnnnnnnnnnnnnnnnnnnnnnnnnnnnnnnnnnnnnnnnnnnnnnnnnnnnnnnnnnnnnnnnnnnnnnnnnnnnnnnnnnnnnnnnnnnnnnnnnnnnnnnnnnnnnnnnnnnnnnnnnnnnnnnnnnnnnnnnnnnnnnnnnnnnnnnnnnnnnnnnnnnnnnnnnnnnnnnnnnnnnnnnnnnnnnnnnnnnnnnnnnnnnnnnnnnnnnnnnnnnnnnnnnnnnnnnnnnnnnnnnnnnnnnnnnnnnnnnnnnnnnnnnnnnnnnnnnnnnnnnnnnnnnnnnnnnnnnnnnnnnnnnatgatctctacaaattttgtgcctctaaattacttataagtcttattcatagcttacagtttttgaattagctcttctaagccttttacctgacttctaatcattttattgtttctagtgtgctcttctaaacattatagatgttaatgtcttcattatttgctcagttatgcatcttttagtggcacttgattcatgtgtagattttgatatctaccccttgactaaagatatcttatgatcttatatctgatattacatagctcctaatcttggtacactttgttctaagaaagcaaaatctatcttccatgctgatgataaactttccttctagtagttctacttatgatcgtgcataatctatgtatggagagttggcatgctataaactaatagttcacacctttcctcatgcttcttgataaagtcttatcttaaattcaaacaatcattagtagcttgaatctagaagacttagaatttacttcataaaagtttgttagcattacaacatttgattccaaaaagggttatgcttcaacataagattatgaggcttagtttgctcatgagccctttaatgatcctctatagaaaatcctagtatagccaaagttaattaggattgaccattgaaggttcatgatgacactaatcatctcctgccttaacttcatggatgtttgcttgtttgctttagagagatcttaggatgaggatgacagttagtatattagcttggggaatctattaggattttacttgtttcttaggaatctagctcattttctacttaggagtctatgtttctcctttattaggatttcttttatgactctttgtacgctaaacttgattatgatatatgaagagttattttcattgtatatggtcatttctattctcattttggtgcacttctccttcacctacactttagttttaaacaccatgtctcataccaccacttacatgttcacatataacaccaccaactaagctttaaaacccatgagccacacatgcaccgaccatgtccataccattactacacaaatagagaaacctttacttcattatttctcttgctacttgttattaaacacaacataaactccaaatcataatttccaccacatcttttgaaagctttgtgaaaccaaagtcccaacttagctttgttgattaaaagttggtggcttctagggtggaagagccaaacatatctcccaccatgggaaaattgattttaattgatatatatatatatatatatatatatatatatattatatttgaaatagacaattgatatttttttcccttttcatacgacatttactaatttatccctctaagcattcccttctctctcactacatgcaactattgtcgcttcaatgacaccattgcctaccatcgccacaagttgacaaccaccaccaccaccattaatcacaactcttcaaagcatagtttttaaaaactaatcggtgatcgatccagacaaaacactgagtcaatgggtcaatgatcaaatccacgagtcattaattgacctacataacccgatctatattaaaaaaaattgaaattctgatatcttgtcttaaaaatagccaaaataaaaaatttatatcaagcttaatataattctacaagctcatgtctcaagacattcttaaagataataagtatttttgttcacatcaatattatgccttttgttcctttaagacattcttaaaaatcataatagtatatttattgacatttttgttacatttttttataaattaaaccattcatcttattttttataaattaaaccattcatcttatattttatcaacattaaagatgagggagcatgcagagaggctcgtgtaactgattggatataggaacaatagtggcacaacactataacggatataagtttttcttcttcttaactttgacttgtccttacaacaaaatttgttcactatctttttacacaaattgacatatccaattacatatatttctaatgaaacatatgaatcaaaatgcttacctaattcagttaaattaaattgaccttggtatatgcacccattgaagttaacaatctttattttcttgctattgttactcattcacaattaccccagcttcataataaaattgctataaagaaaaccttaaacattacattcatgtaaaaacactcaagggtcttcaacagaaacaaggaaaattgctataactctagagtttgttggctcgaacaagacactttcccacccaatgaaaaatggatgaattggatgaaactttgtttacaaacattccaattctttgtggctgttaggtgaagcaatgggggcaaattattccaaggagaggattaagacagggtagcccactgttaccctaccttttcatactttgcactaagggactttcagttatcttaaaaaggcgagaggtgatatccatggggtaaaggtgtgtagagaggctccttatgtctcccacattttatttgttgatgactattttttgttttgcaggattgatgataatgagatctttattcttaaggaatctctagatacatgtggtaaagcattaggtcaactcatcaactaccaaaaatgagaaatctgaatttttttttccagttcaaacaccaaaaaggaccaaaggcgcaacatcttttcctttcttggagttaatgagagcattgtttccaacaaatacctagggctactcttaatcattggaaaaagaaagaaagcactctttggctatatcaaacatagcctttggaattgcatcaactattggacaagcaagcaattatcaaaagtgggtaaagaaattcttcttaaattagccgcttaatcaaatcccactcattgcataagttttttctgcttcttttcattattgaagatgaattgtagaaaatgatgaattcattttggtggggttcaaataatcaacaaaggagaggcataatctggctaagttgggataaaatgacaatgaaaaaagaatttggaggcatggacttcatacaattccatgtttttaaccttgtcatactaggaaaacaaggttggaaattgacaaccaactaagatactacaatttttaaagttcacaaagccaaatattttccataagtggatatttttggttggtgctcatgtatttatacttacacaatatgtgaattttgcaatataaatataacaaaatctagaaannnnnnnnnnactgaaactgaaagttggcgcggttagcgccaggacgcgggctggggcactataaaaggcccatttgcacattttgtgagccaaaaccttcaccatcttcttccctttgcgttttttgccattgacaaaggggaaaagcctcataaaccttcattccttgaccgaaacacttcatttccaacatgaaagatgattggaactactcaatgagctagaatccgtcatcacttttccttgaaaaccatcaaacggagagatccaattctcaagggaaattcacaaagttggactctgaggagaaaagaaggcgtttgaatctccttttgaaggatattgctagcatgcctcatgttgtagatcttgcctcgaaggattccaaaatagtagtgtttgtgataacaaccaaggctaaataaataaaagaaaaagaaaaataaaaaatttcaacaattcgtcgaaaaagcgttagcgacgaaattagcgacggatttagcgacggctataattctggtgccaatagcgccaaagtggcgcgagtaacgccacagatgctgcaagtttgcgccagtagtgccagagtggcgcaagtagcgctactgaaactgaaagttggcgcggttagcgccaggacgcgggctggggcactataaaaggcccatttgcacattttgtgagccaaaaccttcaccatcttcttccctttgcgttttttgccattgacaaaggggaaaagcctcataaaccttcattccttgaccgaaacacttcatttccaacatgaaagatgattggaactactcaatgagctagaatccgtcatcacttttccttgaaaaccatcaaacggagagatcaaattctcaagggaaattcacaaagttggactctgaggagaaaagaaggcgtttgaatctccttttgaaggatattgctagcatgcgtcatgttgtagatcttgcctcaaaggcttccaaaatagtagtgtttgttataacaaccaaggctaaataaataaaagaaaaagaaaaataaaaaatttcaaaattctgtcgaaaaagagttagcgacgaaattaccgacggctaaaattctggcgccaatagcgccaaagtggcgcgagtaacgccacagatgctgcaagatggcgccagtagtgccagagtggcgcaagtagcgctactgaaactgaaagttggcgcggttagcgccaggacgcgggctggggcactataaaaggcccatttgcacattttgtgagccaaaaccttcaccatcttcttccctttgcgttttttgccattgacaaaggggaaaagcttcatcaaccttcaatccttgatcgaaacacttcatttccaacatgaaagatgattggaactactcaatgagctagaatccgtcatcacttttccttgaaaaccatcaaacggagagatccaattctcaagggaaattcacaaagttggactctgaggagaaaagaaggcgtttgaatctccttttgaaggatattgctagcatgcctcatgttgtagatcttgcctcaaaggcttccaaaatagtagtgtttgtgataacaaccaaggctaaataaataaaagaaaaagaaaaataaaaaatttcaaaaattcgtcgaaaaagcgttagcgacgaaattagcgacggatttagcgacggctataattctggtgccaatagcgccaaagtggcgcgagtaacgccacagatgctgcaagtttgcgccagtagtgccagagtggcgcaagtagcgctactgaaactgaaagttggcgcggttagcgccaggacgcgggctggggcactataaaaggcccatttgcacattttgtgagccaaaaccttcaccatcttcttccctttgcgtgttttgccattgacaaaggggaaaagcctcataaaccttcattccttgaccgaaacacttcatgtccaacatgaaagatgattggaactactcaatgagctagaatccgtcatcacttttccttgaaaaccatcaaacggagagatccaattctcaagggaaattcacaaagttggactctgaggagaaaagaaggcgtttgaatctccttttgaaggatattgctagcatgcctcatgttgtagatcttgcctcaaaggcttccaaaatagtagtgtttgttataacaaccaaggctaaataaataaaagaaaaataaaaataaaaaatttcaaaaattcgtcgaaaaagcgttagcgacgaaattagcgacggatttagcgacggctataattctggcgccaatagcgccaaagtggcgcgagtaacgccatagatgctgcaagttggcgccagtagtgccagagtggcgcaagtagcgctactgaaactgaaagttggcgcggttagcgccatgacgcgtgctggggcactataaaaggcccatttgcacattttgtgagccaaaaccttcaccatcttcttccctttgcgttttttgccattgacaaaggggaaaagcttcataaaccttcattccttgaccgaaacatttcatttccaacatgaaagatgattggaactactcaatgagctagaatccgtcatcacttttccttgaaaaccatcaaacggagagatccaattctcaagggaaattcacaaagttggactctgaggagaaaagaaggcgtttgaatctccttttgaaggatattgctagcatgtctcatgttgtagatcttgcctcaaaggcttccaaaatagtagtgtttgttataacaaccaaggctaaattaataaaagaaaaagaaaaataaaaaatttcaaaaattcgtcgaaaaagcgttagcgacgaaattagcgacggatttagcgacggctataattctggcgccaatagcgccaaagtggcgcgagtaacgccacagatgctgcaagttggtgccagtagtgccagagtggtgcaagtagcgctactgaaactgaaagttggcgcggttagcgccaggacgcgggctggggcactatgaaaggcccatttgcacattttgtgagccaaaaccttcaccatcctcttccctttgcgttttttgccattgacaaaggggaaaagcttcataaaccttcattccttgaccgaaacatttcatttccaacatgaaagatgattggaactactcaatgagctagaatccgtcatcacttttccttgaaaacgatcaaacggagagatccaattctcaagggaaattcacaaagttggactctgaggagaaaagaaggcgtttgaatctccttttgaaggatattgctagcatgcctcatgttgtagatcttgcctcaaaggcttccaaaatagtagtgtttgttataacaaccaaggctaaataaataaaagaaaaataaaaataaaaaatttcacaaatgcgtcgaaaaagcgttagcgacgaaattagcgacggatttagcgacggctataattctggcgccaatagcgccaaagtggtgcgagtaacaccacagatgctgcaagttggcgccagtagtgccagagtggcgcaagtagcgctactgaaactgaaagtttgcgcggttagcgccaggacgcgggctggggcactataaaaggcccatttgcacattttgtgagccaaaaccttcaccatcttcttccctttgcgttttttgccattgacaaaggggaaaagcctcataaaccttcattccttgaccgaaacacttcatgtccaacatgaaagataattggaactactcaatgagctagaatccgtcatcacttttccttgaaaaccatcaaacggagagatccaattctcaagggaaagtcacaaattggactctgaggagaaaagaaggcgtttgaatctcctttggaaggatattgctagcatgcctcatgttgtagatcttgcctcgaaggcttcaaaaatagtagtgtttgtgataacaaccaaggctaaataaataaatgaaaaagaaaaataaaaaatttcaaaattcgtcgaaaaagcgttagcgacgaaattaccgacggatttagcgacggctaaaattctggcgccaatagcgccaaagtggcgcgagtaacgccacagatgctgcaagttggtgccagtagtgccagagtggcgcaagtagcgctactgaaactgaaagtttgcgcggttagcgccaggacgcgggctggggcactataaaaggcccatttgcacattttgtgagccaaaaccttcaccatcttcttccctttgcgttttttgccattgacaaaggggaaaagcctcataaaccttcattccttgaccgaaacacttcatgtccaacatgaaagatgattggaactactcaatgagctagaatccgtaatcacttttccttgaaaaccatcaaacggagagatccaattctcaagggaaattcacaaagttggactctgaggagaaaagaaggcgtttgaatctccttttgaaggatattgctagcatgcctcatgttgtagatcttgcctcaaaggcttccaaaatagtagtgtttgttataacaaccaaggctgaataaataaaagaaaaataaaaataaaaaatttcaaaaattcgtcgaaaaagcgttagcgacgaaattagcgacggatttagcgacggctaaaattctggcgccaatagcgccaaagtggcgcgagtaacgccatagatgctgcaagttggcgccagtagtgccagagtggcgcaagtagcgctactgaaactgaaagttggcgcggttagcgccatgacgcgtgctggggcactataaaaggcccatttgcacattttgtgagccaaaaccttcaccatcttcttccctttgcgttttttgccattgacaaaggggaaaagcttcataaaccttcattccttgaccgaaacatttcatttccaacatgaaagatgattggaactactcaatgagctagaatccgtcatcacttttccttgaaaaccatcaaatggagagatccaattctcaagggaaattcacaaagttggactctgaggagaaaagagggcgtttgaatctccttttgaaggatattgctagcatgcctcatgttgtagatcttgcctcgaaggattccaaaatcgtagtgtttgtgataacaaccaaggctaaataaataaatgaaaaagaaaaataaaaaatttcaaaattcgtcgaaaaagcgttagcgacgaaattaccgacggatttagcgacggctaaaattctggcgccaatagcgccaaagttgcgcgagtaatgccacagatgctgcaagttggtgccagtagtgccagagtggcgcaagtagcgctactgaaactgaaagtttgcgcggttagcgccaggacgcgggctggggcactataaaaggcccatttgcacattttgtgagccaaaaccttcaccatcttcttccctttgcgttttttgccattgacaaaggggaaaagcttcataaaccttcattccttgaccgaaacatttcatttccaacatgaaagatgattggaactactcaatgagctagaatccgtcatcacttttccttgaaaaccatcaaacggagagatccaattctcaagggaaattcacaaagttggactctgaggagaaaagaaggcgtttgaatatccttttgaaggatattgctagcatgcctcatgttgtagatcttgcctcgaaggattccaaaatagtagtgtttgttataacaaccaaggctaaataaataaaagaaaaagaaaaataaaaaatttcaaaaattcgtcgaaaaagcgttagcgacgaaattagcgacggatttagcgacggctataattctggcgccaatagcgccaaagtggcgcgagtaacgccacagatgctgcaagttggcgccagtagtgccagagtggcgcaagtagcgctactgaaactgaaagttggcgcggttagcgccaggacgcgtgctggggcactataaaaggcccatttgcacattttgtgagccaaaaccttcaccatcctcttccctttgcattttttgccattgacaaaggggaaaagcttcataaaccttcattccttgaccgaaacatttcatttccaacatgaaagatgattggaactactcaatgagctagaatccgtcatcacttttccttgaaaaccatcaaacggagagatccaattctcaagggaaattcacaaagttggactctgaggagaaaagaaggcgtttgaatctccttttgaaggatattgctagcatgcctcatgttgtagatcttgcctcgaaggcttccaaaatagtagtgtttgttataacaaccaaggctaaattaataaaagaaaaagaaaaataaaaaatttcaaaaattcgtcgaaaaagcgttagcgacgaaattagcgacggatttagcgacggctataattctggcgccaatagcgccaaagtggcgcgagtaacgccacagatgctgcaagttggtgccagtagtgccatagtggtgcaagtagcgctactgaaactgaaagttggcgcggttagcgccaggacgcgggctggggcactatgaaaggcccatttgcacattttgtgagccaaaaccttcaccatcttcttccctttgcgttttttgccattgacaaaggggaaaagcttcataaaccttcattccttgaccgaaacatttcatttccaacatgaaagatgattggaactactcaatgagctagaatccgtcatcacttttccttgaaaaccatcaaacggagagatccaattctcaagggaaattcacaaagttggactctgaggagaaaagaaggcgtttgaatctccttttgaaggatattgctagcatgcctcatgttgtagatcttgcctcaaaggcttccaaaatagtagtgtttgttataacaaccaaggctaaataaataaaagaaaaataaaaataaaaaatttcaaaaattcatcgaaaaagcgttagcgacgaaattagcgacgggtttagcgacggctataattctggcgccaatagcgccaacgtggcgcgagtaacgccacagatgctgcaagttggcgccagtagtgccagagtggcgcaagtagcgctactgaaactgaaagttggcgcggttagcgccaggacgcgtgctggggcactataaaaggcccatttgcacattttgtgagccaaaaccttcaccatcttcttccctttgcattttttgccattgacaaaggggaaaagcttcataaaccttcattccttgaccgaaacatttcatttccaacatgaaagatgattggaactactcaatgagctagaatccgtcatcacatttccttgaaaaccatcaaacggagagatccaattctcaagggaaattcacaaagttggactctgaggagaaaagaaggcgtttgaatctccttttggaggatattgctagcatgcctcatgttgtagatcttgcctcgaaggattccaaaatcgtagtgtttgtgataacaaccaaggctaaataaataaatgaaaaagaaaaataaaaaatttcaaaattctgtcgaaaaagcgttagggacggatttagcgacggctaaaattctggcgccaatagcgccaaagtggcgcgagtaacgccacagatgctgcaagttggtgccagtagtgccagagtggcgcaagtagcgctactgaaactgaaagttggcgcggttagcgccaggacgcgggctggggcactataaaaggcccatttgcacattttgtgagccaaaaccttcaccatcttcttccctttgcgttttttgccattgacaaaggggaaaagcttcataaaccttcattccttgaccgaaacatttcatttccaacatgaaagatgattggaactactcaatgagctagaatccatcatcacttttccttgaaaaccatcaaacggagagatccaattctcaagggaaattcacaaagttggactcttaggagaaaagaaggcgtttgaatctccttttgaaggatattgctagcatgcctcatgttgtagatcttgcctcaaaggcttccaaaatagtagtgtttgttataacaaccaaggctaaataaataaaagaaaaataaaaataaaaaatttcaaaaattcgtcgaaaaagcgttagcgacgaaattagcgacggatttagcgacggctataattctggcgccaatagcgccaaagtggcgcgagtaacgccacagatgctgcaagttggcgccagtagtgccagagtggcgcaagtagcgctactgaaactgaaagttggcgcggttagcgccaggacgcgggctggggcactataaaaggcccatttgcacattttgtgagccaaaaccttcaccatcttcttccctttgcgttttttgccattgacaaaggggaaaagcctcataaaccttcattccttgaccgaaatacttcatgtccaacatgaaagatgattggaactactcaatgagctagaatccgtcatcacttttccttgaaaaccatcaaacggagagatccaattctcaagggaaattcacaaagttggactctgaggagaaaagaaggcgtttgaatctccttttgaaggatattgctagcatgcctcatgttgtagatcttgcctcaaaggcttccaaaatagtagtgtttgttataacaaccaaggctaaataaataaaagaaaaataaaaataaaaaatttcaaaaattcgtcgaaaaagcgttagcgacgaaattagcgacggatttagcgacgactataattctggcgccaatagcgccaaagtggcgcgggtaacgccacagatgctgcaagttggcgccagtagtgccagagtggcgcaagtagcgctactgaaactgaaagttggcgcggttagcgccaggacgcgtgctggggcactataaaaggcccatttgcacattttgtgagccaaaaccttcaccatcttcttccctttgcgttttttgccattgacaaaggggaaaagcctcataaaccttcattccttgaccgaaacacttcatgtccaacatgaaagatgattggaactactcaatgagctagaatccgtcatcacttttccttgaaaaccatcaaacggagagatccaattctcaagggaaattcacaaagttggactctgaggagaaaagaaggcgtttgaatctccttttgaaggatattgctagcatgcctcatgttgtagatcttgcctcgaaggattccaaaatcgtagtgtttgtgataacaaccaaggctaaataaataaatgaaaaagaaaaataaaaaatttcacaattcgttgaaaaagcgttagcgacgaaattaccgacggatttagcgacggctaaaattctggcgccaatagcgccaaagttgcgcgagtaacgccacagatgctgcaagttggtgccagtagtgccagagtggcgcaagtagcgctactgaaactgaaagttggcgcggttagcgccaggacgcgggctggggcactataaaaggcccatttgcacattttgtgagccaaaaccttcaccatcttcttccctttgcgttttttgccattgacaaaggggaaaagcctcataaaccttcattccttgaccgaaacacttcatgtccaacatgaaagatgattggaactactcaatgagctagaatccgtcatcacttttccttgaaaaccatcaaacggagagatccaattctcaagggaaattcacaaagttggactctgaggagaaaagaaggcgtttgaatctccttttgaaggatattgctagcaagcctcatgttgtagatcttgcctcgaaggcttccaaaatagtagtgtttgttataacaaccaaggctaaattaataaaagaaaaagaaaaataaaaaatttcaaaaattcgtcgaaaaagcgttagcgacgaaattagcgacggatttagcgacggctataattctggcgccaatagcgccaaagtggcgcgagtaacgccacagatgctgcaagttggtgccagtagtgccagagtggtgcaagtagcgctactgatactgaaagttggcgcggttagcgccaggacgcgggctggggcactatgaaaggcccatttgcacattttgtgagccaaaaccttcaccatcttcttccctttgcgttttttgccattgacaaaggggaaaagcctcataaaccttcattccttgaccgaaacacttcatgtccaacatgaaagatgattggaactactcaatgagctagaatccgtcattacttttccttgaaaaccatcaaacggagagatccaattctcaagggaaattcacaaagttagactctgaggagaaaagaaggcgtttgaatctccttttgaaggatattgctagcaagcctcattctgtagatcttgcctcgaaggcttccaaaatagtagtgtttgttataacaaccaaggctaaattaataaaagaaaaataaaaataaaaaatttcaaaaattcgtcgaaaaagcgttagcgacgaaattagcgacggatttagcgacgactataattctggcgccaatagcgccaaagtggcgcgggtaacgccacagatgctgcaagttggcgccagtagtgccagagtggcgcaagtagcgctactgaaactgaaagttggcgcggttagcgccaggacgcgtgctggggcactataaaaggcccatttgcacattttgtgagccaaaaccttcaccatcttcttccctttgcgttttttgccattgacaaaggggaaaagcctcataaaccttcattccttgaccgaaacacttcatgtccaacatgaaagatgattggaactactcaatgagctagaatccgtcatcacttttccttgaaaaccatcaaacggagagatccaattctcaagggaaattcacaaagttggactctgaggagaaaagaaggcgtttgaatctccttttgaaggatattgctagcatgcctcatgttgtagatcttgcctcgaaggattccaaaatcgtagtgtttgtgataacaaccnnnnnnnnnnccttcggagtgttctctcaatttcaggatcaaattctaattcttcagagccagctgatcttcgcataaaaacttaagagaagtggttagtagcaaaagttcaatcacaaaaattaacaattactgaaaaatctgttaccaatccccggcaacggcgccaaaaacttgttatcagattacgcgaatgcgttttacggcaagtgtaccgatcgtttaacaagtaataaaagggtaagtaaagtatcgtatccacagggattggaagtttttctcaataattataaagtttgtgattaaacgagaacaataaaatacgcaagagttgttggaagattgtattgaattaggtaaagaaataaaacaaaacagtaaattaaattcgaaagattaccgatgagaagtaattgtggtcaggcacaatcccttataagcattacctccttcaattgactgatgattttatctttaagtttacataagataagtctttcctaattttgtcaatcctagactcttaagagcattaactagtgatttcaccctttaattcgatcgagaaccctaaccttctagcgattctgtcaaactaagaagtcaaagaacaaatcttatgggttcgtgttatgtttattcgaagaataagtctttcctattttagctaatccctaatgtcttagtgaattaaccctttgaactgatttcataacctaatgtcttagtgaaactagtcagttcaagtaatcaaagaacatattataatctccgcactcatgcatccctatgtctaggtgaagaacaaatgtcaatcttatcaggtcagacatcagaactccaatatgtctattgcgaatcctaaccctcaatacttattcagagtgatcaattctaaacaagattatgattaagcacagaaaagaattgaaataaacataacatatgcatttaataccagtcaatttacagagggaaaactcataagttcatgacctttccacaacaaggggattagctagccataggcctcaagaacaccaaagcaattggatgaaacatgattctgcagaattggcttcaatcttgattcctagggtttgctatcaaagattcaatctatggaagtgtctctaagagtgtaattccttctatcagtgtgtaattgtgtctaaaagctcnnnnnnnnnnnnnnnnnnnnnnnnnnnnnnnnnnnnnnnnnnnnnnnnnnnnnnnnnnnnnnnnnnnnnnnnnnnnnnnnnnnnnnnnnnnnnnnnnnnnnnnnnnnnnnnnnnnnnnnnnnnnnnnnnnnnnnnnnnnnnnnnnnnnnnnnnnnnnnnnnnnnnnnnnnnnnnnnnnnnnnnnnnnnnnnnnnnnnnnnnnnnnnnnnnnnnnnnnnnnnnnnnnnnnnnnnnnnnnnnnnnnnnnnnnnnnnnnnnnnnnnnnnnnnnnnnnnnnnnnnnnnnnnnnnnnnnnnnnnnnnnnnnnnnnnnnnnnnnnnnnnnnnnnnnnnnnnnnnnnnnnnnnnnnnnnnnnnnnnnnnnnnnnnnnnnnnnnnnnnnnnnnnnnnnnnnnnnnnnnnnnnnnnnnnnnnnnnnnnnnnnnnnnnnnnnnnnnnnnnnnnnnnnnnnnnnnnnnnnnnnnnnnnnnnnnnnnnnnnnnnnnnnnnnnnnnnnnnnnnnnnnnnnnnnnnnnnnnnnnnnnnnnnnnnnnnnnnnnnnnnnnnnnnnnnnnnnnnnnnnnnnnnnnnnnnnnnnnnnnnnnnnnnnnnnnnnnnnnnnnnnnnnnnnnnnnnnnnnnnnnnnnnnnnnnnnnnnnnnnnnnnnnnnnnnnnnnnnnnnnnnnnnnnnnnnnnnnnnnnnnnnnnnnnnnnnnnnnnnnnnnnnnnnnnnnnnnnnnnnnnnnnnnnnnnnnnnnnnnnnnnnnnnnnnnnnnnnnnnnnnnnnnnnnnnnnnnnnnnnnnnnnnnnnnnnnnnnnnnnnnnnnnnnnnnnnnnnnnnnnnnnnnnnnnnnnnnnnnnnnnnnnnnnnnnnnnnnnnnnnnnnnnnnnnnnnnnnnnnnnnnnnnnnnnnnnnnnnnnnnnnnnnnnnnnnnnnnnnnnnnnnnnnnnnnnnnnnnnnnnnnnnnnnnnnnnnnnnnnnnnnnnnnnnnnnnnnnnnnnnnnnnnnnnnnnnnnnnnnnnnnnnnnnnnnnnnnnnnnnnnnnnnnnnnnnnnnnnnnnnnnnnnnnnnnnnnnnnnnnnnnnnnnnnnnnnnnnnnnnnnnnnnnnnnnnnnnnnnnnnnnnnnnnnnnnnnnnnnnnnnnnnnnnnnnnnnnnnnnnnnnnnnnnnnnnnnnnnnnnnnnnnnnnnnnnnnnnnnnnnnnnnnnnnnnnnnnnnnnnnnnnnnnnnnnnnnnnnnnnnnnnnnnnnnnnnnnnnnnnnnnnnnnnnnnnnnnnnnnnnnnnnnnnnnnnnnnnnnnnnnnnnnnnnnnnnnnnnnnnnnnnnnnnnnnnnnnnnnnnnnnnnnnnnnnnnnnnnnnnnnnnnnnnnnnnnnnnnnnnnnnnnnnnnnnnnnnnnnnnnnnnnnnnnnnnnnnnnnnnnnnnnnnnnnnnnnnnnnnnnnnnnnnnnnnnnnnnnnnnnnnnnnnnnnnnnnnnnnnnnnnnnnnnnnnnagtgttttaattacagtaacttgccaacagcttgagcctattttcgaaacagatatgctttaattcaggaaggaaaatcagtgtcacgcgactcgcgcgcgacaccacgcgactcgcgtgacatggcagtagtaaatggcgcgatgcgcgtgatatatgaagtggctcgcgtggctttacagagcagaaatgcttatccgttgtagtgttcacgcgactcacgtgagatctcaagtaggtcgcgtggcttgacagaactgaattggcttattcttgaagttgtcacgcgactcacgtgaaacatggcgcgagtcgcgtgattctttctggatgtccaagtgggtcgcgtgagttgtggcgcgatgcgcgtgaggtggcagttcttgttttctcctttatttgctcttaatctcccttgttttggcctgcaaacacttaattggtattaaaatgctttatataacataatgtactaactatgcctaatttttatactattttctaactatttactctaaatatgacctaaactaatgctatatttaagatgtgttttcaacacatcatccttcttcacctttcttctcatatcccagcggttgttgcacagaaatttcttcattgagttcaccatgatggaatgccctatttgcacctagttgaaaagcattgaaaagtttttaagcattgaaaagttttgtgctaccaaaacatgtatcaattggatggtatcaagtctagcaaccggagaaaaaacttcaatttaatcaactccatactattgtgcataccccttctccactagccttgttttgatacttgtctacctctccattctcgttaagtttagttttgaaaacacacttatctctaattggcttcactccttctggtagaatagttagttcccatcttttgttcttttcaatttactcaatttctaccattatcgtatctcttcacttcttgctcttgatagcttcttgaaatgtaagtatgtcatcttcagtgggcattatcatagcattcagaccatattcatccaataaacaatcacccatttcaaagtctgtcatccaagatggtgctctttttaccctcccttcattcaaaattggtgaattatcctcatttgattcactagaaggagaacaagtttcatttgagtttcttgtattaacaccgcttccttcttctttattgatttctacttccttttcaatgtcactctcataatcatctttccactttaaaacatcttgtctacatccttctttgcttctacctcaatttcagcattcaccttcttgaaatatcacatccttacaaatgatgattttctttgaaagtggatcatattatttgtaggtctttgattcatcacttactccttatagaacacatttcttacttttgtcatctaacttgcttcttttatggtttagaacatgtgtatgagctacacacccaaaaattcgaaattaatcaatcgttggcttcacaccgctccatgcctcctctagggtttcttttgctcaaccataataggacatctattaaggatatgactcttcattttacaagttcgagtcaaaacattgtagaacctgcttcttagctaacataaagtgcaccatgttcattatcattttattcttcctctcagcaactttgttttgttgaggagtataggctgcagtcaattgtgtactaatgccttgatccttgcaaaaatttcaaactcatttgaggtaaaatcaccactcctatttctcatcaaagaagaaatacatgcaccagattccttttcagcataagctttaaatttataaacatggtaaaagcatataatttttcatgtaagaagaaaatccaaattttatgagtgaaatcattaataaaactttaagtgtacctcttgtttgattttggtttaataggtctgcatatatctgcatgcacaagttgtagcttgtttgatgtctccataaactcttcttagacatagagttttttgtgttttttgctaattaaacattgtatgcataacttctatggaatcttgatcgaaggtagcccatttaccatcttataagaaagtgtcctcaatctattgtagtttaagtgaccaaaccaacaatgccaaagatgagattcattttctggtacagtctgaaaacatgaacacacttctggtatcatggtagccaacagagaaaacattatatttctactcattccagtctacacaattcatcctttcttagcacgacataccttacactttccttgttcaatcaaaatagccaagccctttttcttgaagatgccctatgctcaataggcatggcaacgggggctgtcggggacggtttttacttatcccacccccgcccccgaaaaccgatggggctaaaaaaattgcccccgcccctgcctcgcacccgaacacttaaaaattgttgttaaaaatttaattttaaacaacagttatagcataaaatttgatggcgctaagtcttaaatgtatgtaattacaataaaatttcaacattagatgttcattgttggaaagtaaaattagttatgctactaattctttaataattggatgtagtattcattcctccaagtggttaccaatgccacgtctcatcatatcactcgcattatcacctggataaaccattaaaccataaaccaaaattataatataaagaagaaactcatcattaaaaaattgacattcttatatggtatataccttcatcatctgaagctatctcatcaatcaaagaactactttgtgcaagaattttagatttcaaaatacctgtatcaaatataacataatgtaaataattatttattaaattagaaataaatagtcatttaataggataactaactcaagtattcaagacaataccatcagcttcagcactcaataaccaacttctagtgcacatcaatgcctctaaagtggtccaatgaagtcgactacgatgaggacataaaatctggccaccggtactaaaagcagattcagaagctactgttgatacagaaatagctaagatatcctttgcaatagcttgaagtgttggatacttgagaccattcaacctccaccatgatgtgttgcaaacacatcttaattatagattagttttaggtcatatttttattaaatagttaggaaatagttctaaaaattagtcatatttagtattttgcattataaaagcattttaatatcatttaagtattttgcaggccaaaaagagggaactaaaagcaaataacaagatctggagcatcacgcgagtcgcgccaccttccacgcgatccatttggaagaccagagaagatcacgcgggtcgcgccgttaatcaagtgagtcgcgtgggaacttcaagatttaagcatttcagctctgctggttcacgcgacacacttgacattccacgcgggtcgcgtctgtactcaaaggaataagcaattcttcactgacccttcacgcgaagcacttcaggtttcacgcgacacgcgccaatcctttctgccaaaccacgcgagtcgcgtggtatcgcgcgcgagtcgcgcggttacgattctcttcctgaattaacatatatctgtttcgaaaataggagaaggtttttgatcagttactataattaaaatactcgatatataggagatttaggcacatatatggtgggggagagaaagatacagagaggagagagttttagtgaaggcaaaccctaggaatcaagattggagtcaaatttctgcagaatcatgtttcatccaattgctttgatgttcttgaagcctatggctagctaatcatcttattgtggaaaggccatgaacttatgagtttccctctgtaaattaactggtattaaatgcatatgttttgtttattttaattcttctctgtgcttatctataatcttgtttagaattgatcactctgaatgagtattgagagttatacttcgcaatggacacgttggaattataatatctgacttgttaagattaacacttgttcttcaactagacatagggatgcatgggtgcggaggttataatatgttctttaattgcttgaactgattagtttcactaagacattaggttacaaactcagattaaagggttgattcactaagacattagggattaactaaattagaaaagacttattctccgagtaaacataacacgaatccataagatttattctttgaacacttagtttgacagattcgctaagggtttaggtttcttgatcaactaaagggtgaaatcactggttaatgctcttaagagtctaggatttacgactttaggaaagatttatcttatgtaaacttcaaagttaacaaaaccagtcaattgaaggaggtgatgcttataagggattgtgcctgaccacaattatttctcactggtaatttgtcgatttaaatttactgttttgttcaaatttccttctcacttcaacacaatcatccaactacttttgcgcacttttctgtttcttgttcaatcataattatcataattattacgaaatctttccaatccctgtggagacgatactctacttacactttattacttgttaaacgatcgatgcacttgccatatatacattcgcataaatcgcaacaacaagtttttggcgccgttgccggggattggaaacagatttttcagtaatttttgattttttttgtgattgaaccttttgttactaatcgcttctcttagtttttatgcgaagttcagctagccctgaggaattggaattcgatcctgaaattgagagaacactccgaaggaggctagcgaggcacataaggagagaagttgcacaattcgactttgattcaattcctgagttagagtcagaagaggacatggctgagaatgatagaaacaatcagcccccaccaaggctaaggcctgaagatgaacttatggaggatattctggctcctatgttcacacgaccaaactccagcattgtgaggccaccaatccaagcaaatcactttgatataaacccttcgttaatatcattggtggagcgcagccagtttggaggagatgattcggaagatcctcatgacttcatagacagatttctcagaatctgtgataccattagacaccagggagtttccgatgatgctgtgagactaagtctatttccgtttgctgtgagagacaatgctttgaggtggttgaattgccaaacgtccaacagcatagcaacttgggatgacttggtctcgagattctttgcagagtatttctctatggacaagtataaccggttggtgaatgagatcaccaatttcactcaaagtggaagagaatctctgtgtactgcatggaagagattccaggcattggtaaggaggtgtcctcaatatgatatgcctgtaggtaaacaggtcagaatatttttcaatggcatgactcctgaaacaagaatgatggtaaacgttgccgccggcggaactataagatccaaaaccgccgcacaaacatatgagctgatcaaatctttggccagaactgaaaatgaaagccacacaattcagccaaagagggagcctattcatttgaccactaatgacgcaatgcttgcagagcaaaagattttggcacaacaattggccaaattaaatgagaagatggaccgtctgcaagtttctgcagcacaagtgggcacaagccagccttatattgtttgtgagtattgtcaaggtgaacatgaatctaacacttgtcctattttagttggtgctgaccctgtgcaggttaatggcatttggaatgatcaaagaccgccacaacaaccatatcagcaacagccctaccaaagaaacaacaattatgctgctggaaataacttccaaagaagattccaaggaggtgggttggattacaaatccaacaactatttacagccccctcccattcccaataaggaaccttcagaacttgaaaaagtggtgatgcaactgaccaaaaccaccacagaatttattgctgaaacaagggctcatcggaccaaccaagatgcctccatcagaaacttggagaaccaaattggccaacttgcaaaacagatggctgagaggtcacaaggtcaatttccaagtgatacggttgtgaatccaagagagcatgctaaagccatcacaaccagaagtggtaaggtattagttcctccggaaaagcccgaaccaagtgctaaagaagctgagaaaaattctgcagcacctgaaaatgacaaagaaaaagttgcagaaaatttggaggaacaagaccctatgcgtccaccaaagaagtgggatttttcgcgctttgaaaaacccccatatccaatcttaaccaagcaacaagagcaaaagcagcaatttgccagattcttggagatgtttaaaaagttgcacatcaacataccatttgcagaggcattggctaatatgcctaactacgcaaaatttatgaaagaacttctatccaagaaagaaaagctgaaggaatgtgaaactatagcacttactgaggagtgcagtgcaatcattcaaagaaaacttcctcctaagttgagggatccagggagttttaatattcctgtagctattggtaacattgatgtaggtagagcactatgtgatttaggggctagtataaatctgatgcctttatctatgtgtaagtccctaggtatagctgaacttaaaccaactagagtgtcttcacaattagcggataggtctttaaggacaccctccggggtaatcgaagatgttctagtaaaagtggataagtttatattccctgcagatttcattgtgcttgatatggatggggaaagtgaaattcccctacttttaggaaggtctttcctagccactgctagggccttgatagatgttgagcaaggcaaattagagctaagattagatgatgagtcggtagtatttagcgtgtttgatgcaatgaaacatcctaatgatgaacatgattgttttcgtttagatgtattggatgatgtgatttgtgcaggatttgaagcaagtgttgcagcaattgatgaagaaaatccagcacaagatgtagccaacaccatcaaagaggaatatgcagaaaaatcagcagctacgacacaaggacagctgcagaattttgaaactgcagctgctattcattatgcagaaaattttgcagcaggggacagtgaaatagtttgcgcagtggaagaacaagatgcagcaaccagttctacaaataactcagcggaaccaattatagaagagctggaagttaaggaagatgacattccttccggtgcacccaaggtggagctgaaagaattaccggagcatttaaagtatgtcttccttggtgataaggaaacctatccagttatcatcaatagagggctggaatggtttgaagaggaaaagctaataaaggtactgaaggagcacagatctgctattggttggtctatttcagacctcaaaggtataaatccctccttttgtactcataaaattttaatggatactgacgttaaaccgataagacaacctcaaagaaggcttaatccagtaatgaaagaagtggtaagaaaggaggttgttaagcttttggatgcaggtatgatatatccaatttccgacacatcatgggtaagtccagtccaagttgttcctaagaaaggcggaatgacagtgatacaaaatgaaaaaaatgaattaattccgtcaagaacaatcacaggctggagaatgtgtgtagactaccgaaggcttaacgacgcgactcgaaaggaccatttcccactgccgtttatggaccaaatgcttgaacgattagccggtcatgactactactgtttccttgacggttattctgggtataaccaaatcccagttgcaccggaagatcaggaaaagaccgcattcacttgtccattcggagtttttgcatatagacggatgccattcgggttgtgcaatgcacccgccactttccaaaggtgcatgctttctattttttcagacatggtagagagaggtctagaggtattcatggatgacttttctgtttttggaccttgttttgattcatgtttgaataatttagctaaagttttaaagaggtgtcaagaaactaacttagtcttaaattgggaaaaatgcaactttatggttagggaaggtatagtgcttggacacaaaatttctgaaatgggaattgaagtagatagggctaaattgttattaattgaaaaacttcctccccctattaatgtgagcggtattcgcagttttcttggccatgcagggttttatcgtcggttcatcaaggatttctccaagattgcaaagccattgagtcaattgctggagaaagatgcaggttttgtatttgatgatgcatgccttagtgcattcaatcttttaaagcaaaagctcacaactgcacctgtgttaattgctccggattggagtttaccttttgaactaatgtgtgatgctagtgattatgcagtaggtgctgttttaggacaaagaaaggaaaagagattgcatgtaatttactatgctagtaaaatccttaatgaagcacaaattaactatgcaactactgagaaggaaatgctagctgtagtgtatgctttagacaagtttaggtcttatttggtaggatctaaagtgattatttatactgaccatgcagctcttaaatttttgctgcataaacaagatgcaaaacctcggttattgcgttggatgttactcttgcaagaatttgatctggaaattagagataaaactggagtagagaacaaagttgcagaccatctatccagaattcagcatgaagaactgcaagatggaccagaggtggagataaatgaagcttttcctgacgaacatgtctttgctgttagagtcactccatggtttgctgaaatggcaaactataaagctgctaaaatcatccctgaaacattcacttggcagcagaggaagaagtttttgagtgactctaagaggtatctgtgggataatccttacttatactttaattgtgctgacaatattatccgtaggtgtgtagctgaaagtgaagtgccggatattctttggcactgccattcatccaactacggaggacattttggtgttaaccggacggcacaaaagatcttacaatgtggctactattggccaacaatatttaaggatgcaaaggattttgtgcaacaatgtgatagctgtcaacgaactgggaatgtgtctcgcagagatgagatgcccttgaacaacatacaagaagtagaattatttgatgtgtggggtattgacttcatgggaccatttcctaagtcatttggtaaccaatatatactagttgctgtggactatgtctctaaatgggttgaagcaactgcattaaccacaaatgatgctaaggtggtgataaactttctaagaaagtacatttttacaagatttggtgtaccaagagcgataataagtgatggaggaacgcatttctgcaacaagcaacttgaaagcttgttagccaaatatggagtgaaacacaaggtagcaaccccataccaccctcaaactagtggtcaattggagatatccaacagagagctgaagcgaatcttagagaaaaccgttggaacatcaaggaaggactggtccaagaagttggacgatgccttgtgggcatacagaaccgcatttaagaccccaattggtatgtctccttttcaactcctctatggtaagtcttgtcatttaccacttgaacttgaacataaagctttgtgggcaactaaattcttaaattttgaactaaccaaagctaatgaaaagcggttgttacagttaaatgaattagatgagttcaggttgaaagcttatgagaatgcccgtatttacaaagaaaagacgaaaaagtggcatgacaaccacatcagacataaggaatttgttccgggccaacaagtgctgctctataactcccgactgaaactttttccgggtaaattgaagtcaagatggtctggaccatttctggtaagagaagtttttccttatggcacaatagcaatttcagccttggatagtggtaaggtatttaaggtaaatggttataggctgaaacattactttggaggtaaggtggacagaaattcaagttctgtaccattccaatctaacgctgaatgaactgccgtaagtgtctagctacagacattaaacaaagcaccaattcatgtatataagttttaaattcagttgatagcagtagatttaaactttctgcaaattattcatgcaagtttaagttcatgcatcataaccaattttaagttcattccaattttgcttaaataagtagtaagtattagtttagtcatttcaattattagtagttaagtaattctagttattaggttagaaaattaaagagcatgaggaaaattaaaggtaatcagaaaaggcaagtcacgcgactcgcgtggaactcacgcacatcgcgccatacatactgtccctcaacgcgactcacttggtaaatgatgcgattcgcatcacatatagaaactcaacagccaaaccaaggcaatccacgcgacctgcgtggaatatgacgtgaaccgcgtgaaagcccagaactaaattgcccgatctcaagcgtgtcgcgtgacattagcgcgacccacttgaaatagccagttctacactggagtatggcgcgactcacttcattaatggcgcgtttcgcgtgaatgcgcggaaaccgtttttaaattaaaacccaaaatcgcgccctttaatcccactctccccaaatcaacctccctaaactcctctcaatccataactccctctcaatacccttcactctttataaacccacattgtctcatatctcctgcattcgttctgttcgtgcatcatcatcttcattgcatttaccaattcaaattagacaatggccaaagacaaggtaagcctaaactctggaacaccttagggatagccacatttgataaattaatataaatgattgttcccttcttttctgatttgtctgtggtctgaattaagtgcgaaatttttgggttttaccatattcccaacacacacaccatgcatattcactttggtgcacaccacatgtttgataaaatgtctgaatgagaatttgaatgaaataggcaccgaaatgaactccttaggcataaaatttgaatcaagaagaatgactgatgtgaatacaaattaatacctagtttggtttacaattgtgattatcatatgctaggtgattattgaaaagtcataagtccggggatgattgggaatgagttaagtctctaataatagagacacttaaacttcaaaatgattccacattacagaagggaactttgaaatgaaaacttgaaatcatgtttactcgaatgtggttattgtagtatacatttggagcaattacttatatgcaatatatatacaagttgaatgtgggtgcatacatgatgaaaattaaaatgaaactggaatgatatgtgtgcattgaattatgaatgaaaattgttaatggctcagttgaaattgatgaactgtgaagactcttaatgtgcagattgatgtctacatgtagaagtctaataagtctgatattatgtttgcgcataaagttcaatataaattgttgcataaggcttgatgagatgtgaactgatactccaagtatatgattgctatgaattgtactcaccataatacgaggggtataagactagtgtgtattaagtacttacactatattggcttcaaggtaataatgaaatgttgttaaatcactaatccaagacgtcttaaccaacctaagtcaccatagcaaaaacctaaatctgggaatgggataaatttattcaaaactggattattcactggtatgattagaataataaaataattaaatatgctaggatttcagttttggtgacttgagtccactgagttattgatcttatgaaaagactaagcagatatgctgataggtagatgtcataagctggaattgtacagagaggtcaatatgattatacctgtttaataaaagaaattacatgacattgctaagaccaccaaaagtataaaatctgggagttgttgtctggaatgaaattgatattgaaagacacagatatgagttgatgtaagtgtagttatcattaagctgttgagctataaattggattatttgattatgtattgaatggggttgacaataacctgtggatggggattacacacttggtttcccgttgcttacttagtcactttcaccaaaagaaataaatctgggaattcccaattgtttaaaatgtatatatatgacttggacttttatgaatttcagggcaaacaggtagaacaggctaaagcagtaaaaaagggaaagaagaaaactaccggggagagcagcaagaagagagcccgagtggcagactttgatgagctacgcttccgcaccatcgagtgccaagaaaagtttgattcttggtacctacccaagaggatcatcagggagcggaagattatgtcggaaactttccttgaggacaaccccattacacaggtcatcctccgcaggcggtggcagagactcgtgaccttcccagaacctagctccagcatgatcctgaaggaatttttgtccaacgtggatcacgacaccgtataccgcactaggagctcttgggtgagaggagtcacagtcccttttggagagaggactattgagagcctgcttgacactgattacgatccctattcagcatgcgacttcatcaggttattttggcatatgcagccggacgcagttactaagatgtataatgatgacgtcccggagcttgctaccaccatccgccgcgctatcacaggtctatacacggcttggcagaccaagcccagccttgactacataccagagaaattaaagaagtctgagttggtaggagatgcagctttttggcatctatttgtaaaccacacggttatgccatcgagaaacataaccgatgtgaacgtagagcgcgccattctcctatacatcctacgcggggcaggtaaccttctcatttcatcagtcttatctgataggatcctgcagatgactcaggacgctagcagcaggtcctggattggacattcttctctcattctccttctttgtcggcacgcgggggtacccattgacgaggacgaggacatggacgtcccgatagcgccacttatggtctataagacctacactaccgccatgagcgctgcagcagacgagcaggtagtcagagcttcaaagctcacacctgaggcaattgccgctgcttctcctcgagaccttccagttgatgacccccagcatgatcagtcagctcctacaccaccagtttcacccatcccacagacagcaccgacatcaccaccgacttctatgccaccaccatccacagtacccacacgcactccactctacgaggactctccgagtttacttgatttccagcagtttgtgaggactcagctggagtttcagagtgcacagttggcattgcagacacgcatgtggggagccgtatgccagcatttaggcattgacccttcagagtaccagacttcagctccagcacatccaccacagccacctcagccagttgtcgaccacaccgatccgattgaccagacatcggatgcggacacagcgatcacccagcctttgactcagcagactgccgctgaggagaccacacaggattgagatgcggccgagtgatcaggatttatcataattttagtttcagacttatgtttttggattactttttattattctgcattacatacatcttatattctgcacatttatatttcatttacatttctgttactgacactttgatagcactgcattatatatagtacagtttatgggttataatttttcttattaaatctgttttgacgaatgtaaattgaatgcgatttctgaataatgcttcaaaattttcaaaatcgctatgaccatgtttgtggttgctggggacagcaacatataaatctgggaatggttacgcattatttcgcaaatcacaatcaagaatcaaaggaagtctaacagaactttttgaaaatttttatataatcagagtttttcaaacattttcttaaaaataagcagcacacaaaattttttttcagattaagaaagcgaatgaacttaatgatagacggatttctctgaattaagttggatgaaataagagacatggactgcatcatgcatgagtagaatttgattgatagtatgtgaaactcatgttgaatgttgaaatgatgccagatatgcagttgattgagaatgacttgagtcacaacacctgtaagattttgggccaaattcggtaaattttcttctgagagactccatgctttatggtattctagaacttgacgtgtttctctaagtgcaggtgtgacttgaaatgattaaggcatgatttgttctggaaactagggccaaactgacttacccaagtaaaattttcctttaaacctgaattttgagcttagacctttcatttcaataacccaaattaagccatgtccaaatgactgaacctttttgaggctaaagaaggtgaactaagtccatgacagaaaaatgctattgaccaaggaatgaaggacaagaagagaaatcaaatgaataagaagaagaagctggaattcatcagctgaaaaatgtgaaaagccgcaataatttagtatattctgattacaaaatatatatataaaaaaaaaaattgaaaaagcaaaaagaaagtagtattatgttattttatgcttagaataaaagagattgaataaaagtaccagtttgaaccagagaagacaagaagcttggaagaccacaatacgcttggacttagggaaccagacttagcctctgattgagctactttttccaaaataattcccacccttagccaagccacgttacaagccttaaaagaccttctgatcaagtcatgcgtgcaactaatgagaatatcttcaagcctatggtaatactatgatcatgttgagtaagagggtaattataacctgaaacacttgagtgagtgagcgattatagacacatctgtgaggtaaacgcaagtagtttctatgttgacagcaatgaaagcatcatggaggatttaactaagtagatcatacattcatgatgattttatgattgagaattgtggtttttttttgttgattgttgattcttgcttatgtcttagaattctttctattactgaggacagcaaccttcaaatctgggaattgtttgatgtgttgcaaacacatcttaattatagattagttttaggtcatatttttattaaatagttaggaaatagttctaaaaattagtcatatttagtattttgcattataaaagcattttaatatcatttaagtattttgcaggccaaaaagagggaactaaaagcaaataacaagatctggagcatcacgcgagtcgcgccaccttccacgcgatccatttggaagaccagagaagatcacgcgggtcacgccgttaatcaagtgagtcgcgtgggaacttcaagatttaagcatttcagctctgctggttcacgcgacacacttgacattccatgcgggtcgcgtctgtactcaaaggaataagcaattcttcactgacccttcacgcgaagcacttcaggtttcacgcgacacgcgccaatcctttctgccaaaccacgcgagtcgcgtggtatcgcgcgcgagtcgcgcggttacgattctcttcctgaattaacatatatctgtttcgaaaataggagaaggtttttgatcagttactataattaaaatactcgatatataggagatttaggcacatatatggtgggggagagaaaggtacagagaggagagagttttagtgaaggcaaaccctaggaatcaagattggagtcaaatttctgcagaatcatgtttcatccaattgctttgatgttcttgaagcctatggctagctaatcatcttattgtggaaaggccatgaacttatgagtttccctctgtaaattaactggtattaaatgcatatgttttgtttattttaattcttctctgtgcttatctataatcttgtttagaattgatcactctgaatgagtattgagagttatacttcgcaatggacacgttggaattataatatcccacttgttaagattaacacttgttcttcacctagacatagggatgcatgggtgcggaggttataatatgttctttaattgcttgaactgattagtttcactaagacattaggttacaaactcagtttaaagggttgattcactaagacattagggattaactaaattagaaaagacttattctccgagtaaacataacacgaatccataagatttattctttgaacacttagtttgacagattcgctaagggtttaggtttcttgatcaactaaagggtgaaatcactggttaatgctcttaagagtctaggatttacgactttaggaaagatttatcttatgtaaacttcaaagttaacaaaaccagtcaattgaaggaggtgatgcttataagggattgtgcctgaccacaattatttctcactggtaatttctcgatttaaatttactgttttgttcaaatttccttctcacttcaacacaatcatccaactacttttgcgcacttttctgtttcttgttcaatcataattttcataattattacgaaatctttccaatccctgtggagacgatactctacttacactttattacttgttaaacgttcggtgcacttgccgtatatacattcgcataaatcgcaacaacacaccacaacaaaatattaaaatcagtggatcatggtaaaacatcctcttctaaataatgatccaactctatttaagcatgagaacttttggcctttttttttccttgaaatatacttatcaaattcacataattcatcacattcttcattatcaccttcaggtattggagaggtatggaaggagtcatcgttcatgttggactgataatcagaaaccaagtcataacacaactgtctaattttactaacttgagcaaaacagttatgttcatacaatttttcataataatattgcaacaactccattttgtatcttggatccaaaacagtagcaactcccatgatatcatgaatcgcagtccaatatcaaagttgatcatcatcttttctgccattttttgaatgatttcattaggagaagtaacccactgcttaattgccaagttgatctcacaaatctttgaaaaatacatgttagctgttggttgtttagaagcagaaaatatttccgttacagcattaaacactttcaacttcccacacacatccttagcaaattgccattgtgaagaacttgacaaacaagtatattgggactcctgttgtttcaaccgagtaaacacaacttcatatgatatagcaatttgaagcattttataggttgagttccacctagttggacaatctaaaaccaaactcttagtgcacgggattcttaattgtttcgctgtctcctcaaatttttctttcctctttggtgtggctgtccaaaatgctacactatccctaattttctgtatcccatctttcacaatttctaacccatctttcaattcaatatatgtgcacaacaacgcatatgaagcaaagtcccatcccttaataaatttcctaagtgcaacttatctttaattttgtcaattattttgtcatttgtgctacaattgtccagagtgattgtggacaactttgtatcaatgttccaatccatcaaacactcaactaacacattacaaagtttttcacttgagtgaggagcgggaacataaatgaacctaaaataaaatataaatagttcaacaattttatcatgcaacaattcaataataatataaaaaaattcaaattttttaacatacctcaaaatatgactctttaagttccaagaggcatctatataatgagcagtcacaaccatataaccttttttctgattgcttgcagtccacatgtctgatgtgatgacaactcttccttgaagactatctaataactttgaagttattgatctttcttcttgataaattctgaaaatttcttttttaattgtgtttctacaaggaacttgaaagatacgttgtaaagctgctgaatatctcctaaaaccaacatggtccacaatggaaagtggatactcatgcataataattgcatttgcaagctctatccttgcattatccgcatcataagttcctatacccaactcttgctttccatgattaaccttagaaacgagaaatgttagccctgtactccctctagtgtcaatcttgtactgaacacaaatttgtttatgcccccataggtatgttgttccattttttgattttcctcccaacagttttgaacaataattgcattgggtcttgtcttgtccattaactttaacctttttaaaatgcttccaaatctcacttttaagtctacttgttcctgtttgtgttgtcccctccaaattatcagctatttcttctgcttcatgtagcggaatggattcattgggtgttgatgaaggggcatgatcagcagaagttggaggagtataaccaacaccaggagaatgtgaaggagtatagccaggaacaggagttgtatcttcatgtccactttgttgatctgccatttctttagaagcaatcaaacaagaaacaagttaattaactataagaaaatgctatggtaaatgaaacatgtaaaaaacttaatgtaagaagcagtcaaataagatagatttaacaattgtttttatttatttatttggtaatgaatgcccttctttggcagcaacacgcaaaaagcaagtgagcatagtctaatgagggattttttttatttaagaatatgttattcctacaatacaacaatgtcttgaaacatactgaatattcatagcaagagcccttctttggcagcaacacgcaaaaagcaagtgaatattcatactatccataggttaatttaaaaaggaaccacatgtaaactatagctctggacacatgtaagcatgtgttaaactacataatttcaaaaatcttcatatgaaaatatcaactgtgcaaaagttcagaaggccagaacacaatacattgacacgattcacacgaattctggctagctttaatactgctgtgtattaatggcatgtatataaccaaacacaatgatagaggacacaaaaatctgtagacacatttctaatctctaacagttaacaacttcaagacttataaatcagggtgcactacacaatgatattaatattaggtgttcacttaatcagcctatgatactaacacaaataacagaatgcatcaaatgtgtctttagtatgaatcaatacatatctaaaattattctctagaactttgtcaaatgaatcaatacatatctaaaattattctctagaactttgtccataacagtattaaaactctaaaatagcttcataacttcgccctttagtatgaatgttatctgaaatcagctttataccttagttccagctgtttggccttcaattcttctggggtaagcgaaggtttaggagcctcaattttggtgttggcaggtacctgagtgaatcattaatcagcaagttaggaactagagtttgcgacttaatcacactgaatagattttaagatttatccataacattaactagtcttatttttgttgtagtttgcaacatcagatctattacttatgaagcaataagcagttaagcaaataatgacaataagcaatattaaaaatataaatattgtaccaagggcatctgatctatgtcaggatcattctcatgctctattatccaatttacgacagactcaaggccagcatataaatatatagtaacaaatatacttacaggaacaatttattggcacgatatatagtaacaaatatatatattgattatatatttcagcgatattgtttcaacgatatattgtaaatatccaggtttcatatctagagtctcaataattatcaatgtccagatataaataacattaatggtgtattgtaaatatcctaaaaattgattgcttattacatgtatcctagatccagatattgtcacacgtataatgaaacagctaacatactccataatgccccatgatgcattaataactacagatctctattccacaaactatccaatcaaaagaagaaagtaatttcaagacagaataatgttgttaaatggcggcaccattgcagattggcaaccgccacaagcaacttgtgaagggaggcctcctttggcggtgccataagcaactagctataccgaagaagaaatatgggtattccttgttcgttttggtttgtcttggttttaaggatccttttcagaatgcagaatatcacaagtcaataaagattgtaaagggtttcaacttaaaatcatcaataagaattaagaaatgaagaatcgcatcagtccctactcttattttggccatagaatggatgcacgtgatataagcaatcaaagaaacattttctaagcaatttcaataaacataagcatttttcaaaaggttacaaagtattggaaatgattcaaaggtgaaagaatatgacttacctaaaagggggtgagattggaactgaaaagtgagaagaaagaaagaacgaagagcgacaaagtgaactgaggtgttgtgagaagaaagaaacaaccgacagcaagaaaaagagttgtggtgttgtgggtgagatagaagctgttgtccagtccagccactccagcaccgtcgacaacgagaatgaaattgggaaatgagggtttcagccttttaggttttcttcttttttatatataagggtatttttgtaaatatagtatggtgggggtgggggcggggccggggcatatatcagtattaccaaaacagcccccgaccccgaattcaacaggcggggaaaacccgaacccgtaaccggtcaactcgatttttccccgttgacatcgggacgggttcggacggatgcccacggatgcggatcaagttgccatgcttaatgctcaacaaattattcttaagtttaagaacatagtaaactcaagaaattaattgagtaaatccattcacttgcataggaatgttgccttttcccacaatgaccattttggtgttattgccaagttttacagtttggccaaaactctcatcaaactctaagaaccactccatgtttccagtcatatgaatgttgccacatgaatcaagaaaccacacctcttccctcttcgcttccttgagttcattgtaagacattaatagcaactcttcatcttcttcctatccaattcaacatagttggcctttttctcccaatcgggacactcatattgatagtgacatttaaaacatttgataacaactttattgaaggattgtctaccccttcctcgattcctctgaatgcactgctactactaccttgacctttacctttacctattttatcttcatgcgagatcttcaaagcctgttcttcatctccatgacttctgattctttgctcatgaacgagaagactgctttgaagctaattaatagtcatccttccaagttgctagattcttcaattgagcataccatacaatcaaattttaagaccattgatctcaaaatctttgcagtaatgactgtttcactcatactttcaccatcagccttcattttgttggctatggctagtgtacaagaaaaatatgcattcagtgtctctccttccttcatttgaagaatctcaaaatctttgtgtaaagcttgcaactatgccctattgaccctaattgaaccttgcaattttttttgcttcattgaatcctagatatttttggttgtgttcctcttgagaaacgtttcaatgacttcacgatctattgcttggaaaaggtaattctttacctttaagtccttcaacaacttatcctccatcaatttgcattgtgcctctgtaggctctactccagctgccaccaccaatattccattctctacgagatcccaatattctttggagcgaagaatattctccatcaacattgcccagtggtcatagtggcaatcaaaccttagaatagcaggctacacaaaactaccgctaccaccttttaccattgttctcaactccttttacctgaaaaaatgcagtctctttcttgactcacacactcactgttttcctcacatactcgtgaacaaaatttagatgaaaaaacatttctttcctgaattccctcccatgtcctcctaaaattaaaccaaataactaaagattaagagaattcctcccctcgcctccattagccgtttccttcaaacaaaacttcaaataatacttttatttgagaataaatccgtccttatcgtaagcacattaattggttagcaaacccttgataaaaatggttacaattctccactacggcactaccacagtccacaacgtaaataacgaaatccacgcaaaatcatgtagaaaagaaacttgtggtcaaaacatggtcaaactccaattatatatcaatgcaacaaacatatcatacctaaaattgtacatgtaaaatttcctttattaaaagaaaaatcaattgcagaatcaagtttctagtccatcaaaacaatgttcactttttattgatcagcagaaacattggcaatttctgcagcatcagattgcaagcattctgatgcctcatcaggcacatcctcaacccaaactcttgcaccataaacagaagccaatgcggctaaacactgtgccactttattggcattgggagtcaccaatgtgagagatgattctgtgccctgcatcatctttatgcacccatctagaatttcattctggtaggaaatatcatcactagtgttcttcttgttatttccttgtgttaatatgttccattgagtgtacaactgttggcaatcggtttcgaaaataacttcaggaaaccagaggtcctctgctttctctatagcccacttgtagcagagtgtatcagcaatttcggattcataatattcatctaccataaaatatgtacctgtagcatttaatgtaaatacgcttaatactcgaagaaagatttgacattaatttagaattttgatcctttatttatatttaggtttcagtttggtggcttaagtttaaaaagttttcgttacattcaaaattgacataattaacatcaaaaccttgtgggaagactagtttgcaataacaaagatactgtaaagattaaagtgaaactttatacacttaaataaccgaaataaacctaaaatatggataaacaatcaaaattctaatttaaccatactttacatattcaaacaaagagttttaacatgatcatatttactcaaacagaattgcctctgtatgtgggataaatatgatttgtaccaaaaaattaagaagaaaagaaaagaaattgtacctgatgccataggttcacctttatagtttctaaaaaccactcccaatccagtcccaaaatcctctatcacagcagcagcaaagttggccttaactttggaatccaaaggtgggacccactcctcagtaacaagcacagacaaggccttggccataacttgtgggaaatccaatttcttctttcctagaacccaaacattgcgtttgtaccacaaaccccacaccatggcacataacatgcccattcctcttttgtccaaaacatccacacactgatcaacccattgtgacatagtgatattggccacattgtgccacgagtccactctaagccccaatggagaccccaaccaaaagggcttaaccccttcacacagcaacaaagcgtgtgtggttgtttccttgcacgtgccacaacacggacacatgtcgtcgtcgtctttgatgatgcccttttgtaacaacaaagatctcacgggtaatccttccctgcacgcacgccacaatagtttcttgcaccttagtgatgccgttgcgttccatataccctccgccacctttgaatttgagttcaacgcacttgaactaccacttgccatgtcataaactacaagaagaaaggacaaataaaaacaccccaagaaaaacaagaaatattaattattattattattattattattattattattattattattattattattatcggaatagccttatacgattaagaataagagtacactgctatttaatttaccaacgtaattgagaaacttgattgattattaatgagaagaagaatctaactaacctcttaatattgcgatggaagatgatgggcaaaaagaaaccactcgagaaaactgttcgagaaaaaaatgaaatgaaatcgtattaagaaacgaaacgaaacagtcgaaagaaaattcgaagaagctggagaaaatcataaaagaaagtttcttgtttttcttcgaattgacaaagagattgaggagcattttgaggagtgcaacttactgagtagaggagaaagaagaacgagaatgaaagttgaggggaaattatggtgctaattaacgtccttttagttgggttatggatcggttcatgctcaggaatcgtctatatacataatttggttctctcacaaatatggaagtgtaggacgggttgtaatgagatctttttagttaacattttaaccgatgttatcaacttcaagtaaaaaaattaattgattgagctactttttttattttatatataagttcgattgagctacttaaaataataaaaataatgttactggttgtgaaattgcagacatatatagttgtggcataagggcaatgtagagtactatgaaaatgaacaaaaggaggacactaagtggaaaaaaaaaaaaaaaaaaaaactattggccgaatgctgaaagtagtagaaaaccgaaattcccatgctactatttttgaagactatgataaacggagtcacttgttcattgtgcccattagtttatgggtgaaagctcgtagacacactactagaaaaagcagttttaacaccgttacattaatatcgatttttttcaaaaatcaatgttaacgaaaagacagtggcaaaatcgtaattaggacgaacaatttaacatcggttttcttaaaaacacctaaaaatcaatgttaattagtacctgttaacatcagttttaaagtttttaaagaagatcgatgttaattagtccctgttaacatcggtttttatgtttttaaagaaaacaagaaaaccaatgttaagctggattagttaacatcggtttttaaatgaaaaccgatgttgttattgttattatacaacatatctggcccccaaatcaaataccaccactgttgcgcccttctcttttctgtcatcctcaacctcagctatcatattttctcgctctcgcacgctcgtggttgttgtccgacgctcgctacctcagtctcaccatcttcccgtagctacctcgctctcgcacgctcttggtcgtagttgaagcaaaccgcgcatctccatcctaggttagtatcaactaacatcgcgaacttccaatgctattgttgtcgcaagttaggtatggttctgcattagcatttttgtgtgtgacgaagaggttgaatgtgatattggttggatgtcacttttgtttcccactaagtgcttcataaaatggctaatatgtatatgttgtttgaatgtggttttggacataactatttttattcttacaacattaaaacatgaagtcttggtgtcataatctgatttgtgccctctgttgatttatttggattggtgcatatctaggttgaatggtagttgcttggtgcatatctagtggcacttgataatattaagaagcatgagaggatttgaactgattctttttataccatggtcctttgactttagtacactagctatttcattgatgatcttccggttgcatgtgaatagatttgtagccattatttttttgtctcttccaatgcacttggtattggcattagctaatcattagaaagcactcaatggagaaaatgagcagggttaagttggctactagttggcttccctaatggtcaatatatgaagttctcatagtataatgttgccattttctgtgctacccaaactgtagtttattcaatgtatgaagttgtgattggcttctattgcaagagtagtattgaaaggtattattgtgtatgcaccattagaagtgttgaactggttgttactaataaatgtcaaccaagcaaatgagcataggagctacagatttacactaggagaaacaagaaagaaaaacaaaaacagaatacatgtttgctggtttgtttttgtttctattttggcttatgtgatacaccaatagtggggatagttatagccttatagatgtttaatttattcatgttgttattatactaaattaaacgtaccatctctaaacgtaccataccagctgccacctatcattcgatcttctagactcgtgtaacatatgttaaattcctctaactctaccaatcctatggtccccaagggatatgatcttatggtggagggtacaagtgatatggttgagtcatcatgagaaccttctagatttctttcactggaatctttttcctttctctatatatactctttgtattttgataaatgtaagtaatgaattatgagtttctcattctctgaaattcttttctctgttgagctactagtttcttaagaacatttgattaaaatgtgcctcaagagtccatgaagatgctgttaaaatacccacctcagaataccattgactgcatataaatttgggaggcaccttcaatttccatatggctaaaaagaacgtggaatgttgcaatggatactgtaggtccaattaacacgataagccgaacttactgaaaaaatgccagagctatcagtagtccacacccattggtcctcttggttctgtttcagtctcacattacacaaaatctgttgaaaatggcttaccatttgagtttccctttgccaccagcccctcctccacgagaagctccatgaccaattgttattctcccaagatcccagatttgctaccacctccttttgttgttgtgaaacaagaaaaaatctctcacccccattccattcatccatccaaaacaaagtattttccccatttcctaaatcccattttatgttgttatcaaacaatttctcctaacagttacctatgatgtgagagtatagttaatgtaaagattgtggaaatttagacttagtcgtgggtacataaagtgttctgtgaaattgattgcaggtgaagtgtacagggtatgcaaaggttaattccttgatttagttattttcttaggtgttttataattgaattaaaccatgtttttccaacctaagtaataggaagaagattaggagtgaaggaatgtaatcctagatgaatacatttgggtatcaatgtctgtggaccgtgacattaggctaatgaagttgtatactataatatattcattgtttattttgctatgttgatattccatctatgactttgccatttgtccatttttccttcatatgttgttccatctctgactgtagcctcatcaccttttgtattcttcttagataccacatcggttgtaggcacttttcgtttttgcatcgtgaacgacaacaattgttgttgttagctaccatcttaataggtaggagtgtctttcataatttgagcaaaattgtgtgtgtgtgtgtgtgtgtgtgtgtgtgtgtgtgtgtgtgtgttgtccttgaatataacttgttcaatgttcaacatcatttgtaggcagttgtccttttctactttgcatcatcatcactagatttgtggttgcagattgtcagtgaccgtcatcacagatacttacgaatttgattagtattttttgagattctatattgtcattgactgtgatcaagtgttgatcttcctttgttagttgatcatgaaagattcacttgtaataatctccactaaacatgcatcagtggcacttgttatgtaagtgaatcagaaaggtcattgattttaacatgcaacacaactttcctacaggaccacatctctctcacgcactctatcttcacatagtctccctctgccccaaaccaaccacagtttccgctttagtctctgcaatcccaggtgaacacccaatcaatgatattttttatgtcaagtatgaatcttgccttttctagacaattaatgttcattatgagtgaaccttagtttcccgtttgagattcattacagtgattctaccagacagtttggattaattgttgtgttgattcttgaattgtccgtttggacagtttaggaagactcatatttttttagtatattcatatgtgtaggttgtgattcttttcttaaatttgatgaaatttcagtacaatgcatttcactttgttctccgggtgcatactttattgtggtggaactcatgtcacagctttcatgtcgtgtactcagagatcaaagcgaaatgctgccaaaatttcgtcaaatttaagataagagagtcaacctatacatatgaatatattataaaaatatgtcttcctgaatgggatagaatcacaccttgaatgaaaaaagtgaggttttcatgcatggaataattttgtgagtatcacagagttattaattagatggatcgaagttggatgaatgcaagtcgcgtcacggttgagtatgaggaaggcgttaaacatttcttgcaattttcctccaaaagaagtcaaccagatggggatggaaaatatttttgtccctgtatcaattgtttgaatggaagacgccagacactggatgacatacgggagcatcttttgtgcaatgggattaagaagacttatatcacatggatatggcatggtgaattgacagacacgcagagtgtctcgcaaactgaaccgcttgatgatgacatcggagatcgattagaggatatgattcatgatctgggacatgagtcttttcagcaagcacatgcccctatgtatgatacattggaaagtgattcaaagaagccgttgtatccggggtgcaaagagtcattgacactgttgtcagcggtgttaaatcttgttaatgtcaaggctagatatgggttgagtgacaaaagcttcaattcactgcttgaggtagttaaggacatgcttctagaggaaaacacgttgccaagcagttactatcaggtgaagaagattatttgtccgatgggtatgaagtatcagaaaattcatgccagtcctaatgattgcataatgtacagaaatgaatttcaagatatgcataaatgccctaggtgtggggtattacggtacaaagtgaaggccgatgacgactgtagcattgatgaaagcacaaagaaaggcccccctacggcagtttaagtactcagcacagttcgttgcctgttttgctagtcatttacaaccggcctccttggttgtgcatgaagcgaaaatacacgatgttgtctatgatgatatcgggcccaagacagtcaggaaatgacattgatgtttatcttagtccattgcttgaagacttggcaaacttgtgggacgagagggttactgtgtttgatgggtatcgtaaggagacattcaaattgcgtgcaatgctattttgtaccattaatgattttcaagcgtacggggaatttgagtggatatagtgttaagggccatcgtgcatgtcctatttgcgaacaagacacaagctacgtacaacttaaacatgggagaaaaactgtttacacttgccatcaacgttttctaaaaccttatcacccttatcggcgattgaaaaaagcattcaatggaagtcaagagcatgaaactacaccgattccattaaccagtgaggaggttcttgagcgggtagagggcatccatactgtatttggaaagactcaaaagaattagaaaggaaatacttgcatatggaagaagaggtcgatattgtttgatcttccatattggtctgatctagatattagacattgtatcgatgttatgcatgtggagaaaaatgtgtgtgacagtgtcatcagcacactgcttaacattcaaggcaagacaaaggatggcttgaacacttgtcaagatcttgctgagataggtatacatgagcagttacatcctaggtctgatggtaagaaaatatacttgcctccaacatgtcacactttgtcgagaaaggagaagataaggttctgttagtgtttgcaccgagtgaaagtgccacagggatactcttcattattaagagccttgtgcatatcaaagatctaaaactagttggcttaaagtctcatgattgccacgtgttgatgcaacaactgttagccgtggcgattcgagacattttgcctaataaagtgaggcatactataactcgactgtgctttttcttcaacgccatttgtgccaaagttgtggaccctgtcaagttagaacacttggaagatgaggcggcaattatcttgtgttagtttggaaatgtattttcctccttcatttttcgacataatggttcatttacttgttcatctggtcagggaaattaaattgtgtggtctcgtttatttacgatggatgtacccggtcgagcgatatatgaagatcttgaaagggacggtgaagaatcttcaccgtcctgaagcatccatagttgaaaggtacattgcagaagaagcagtagaattttgttcagagtaccttgaaaaggcaaaacctgttgggcttcccaaggctcgccatgacgacagagtcgcaggtaagggttcacgagggctgcatgttatcactcctggttttttggaattgcaacaagcccatttgtatgtcctgaataatagtaacgaagtcctgccatacatagttcaccatgaagccatagtcaagaaaagtaatccaagaatgacgaagaataggttgttgaaagagcataactagactttcctgaattggtttaaagatacaatatttagtgatgaatcttcatctgaaacaatgagaaagttagcagatgggcctaaaagaaatgttagaagtttgcagggatacgatatcaacaagtactcgttctacaacaaacaacaagatgaaaaaagcacaatgcaaaacaggggggttagcctcagggttgagtcgcagcactgcgctactgtgcatgaccacaatcaccatttggcgttcatgccttactttggagtcattcatgacatctaggagcttaattatgttacattcactgtgtgtgttttcaagtataagtgggttgatatcaatactggtgtgcggaccgaggacttgggatttactttggttgatcttaacaagctagcttaccaagatggacgtcaggatgtcctgactactgccattggacgaccagagcatcctggccttgtccgggctgttggagtcggtgtcaccatcacacactacttcagaccggctacatcaacctctcgcaagaagaattctatggcgcttgaagacttggatcggctgaaatacaacatcagggacgagttggagcagtcgatcactgatagacttacgcagtcgatcattgaaagagttacgcagcagataatgatgtcattcagccagctccagtcccagatgcagtcgtagggcgccatgccgcctccagaggttcagtcatgtccctttggtactcgtgtcagcaccaagggaagctatatcgatccctcggggaatgacccagacacgggtgcatctgataggcatgggttgtatgtcgatgacaatcctccccgcctagttgcccttggaagagtttatgagggttcgacaaccgtgcacagcgtcccacttgccaatgatcaggtcaaggtgggtgttgaggaagttctagatgctgatgctcacatcccagtacccactgacgaggttcagttagtggggcaggcccttagcaccttccttgcttggccgacacatcttgtacagcctattgtggataaggtatttcatttttgccttgtctcttgtcatttaagaataatttgtctcatataaggttaagacgatcgtttacctaattgtgtttgttaactgtgttggttaaatagggacttgagagaccggtgaaacctgtaaataaaccgaatcgtgtcaacgatcccttgtaccagatctcattgacgatccccgatcttttcctcagacccatgcaggtgccatgggaccctactttgttcagggtgcataatggcaacttctcgttgtacataaagcatgaggatatttctgagatcatccatggtggtcaacgcctgaacatctccgttatacaactctagattctgtaagtcactttcaattggctaccgttacataactcattgctttatattcatgcataattgattttatttattaaacaataggcatatgaatgacttatgtctgccatcggatcatcccgatgtatatggattcatcgagctacagtccatacagagatctgggcaatctcaatttaaatctgaggactatatcaagaaatggatgcagagtgaaagatagggccttgaagcccgaaggtatgtgagaaaaacaaaatttttcaagcggaaacacacataccacacaagaatcattctttaggacatagatgttaccttttttatattcgaaattgatgatcaagaataggcttgaagatacaagccctctaatgttgatccacaccacttcttgtcaaagctcaagaacacttcttgaatgccaccaacaaacaccaaaggaggcaagctaggcgcaccaatggagaggaagaaggttaggttttaaagtgttttacttatataagagactcaccaatagaagatattggtggctgaattttcagccaaaactcacaaaaaggggcacgtgaaaaggaggaagatagatggggtttttctcaaaaaaccattattagagaactatgatcacaagagtatatttataaaagagttttaggttagatttttaaccataaaattatgatcattaagcatctcacacgtgaagaaaagatagagttgttgtatttcaaaaatttccaacaacctcctatattatcttcctaagaccaagtcaattacttggaatttattttgccaaataataatcaaatatccagccatatgataagcctttaatcagccctcaaacttcttcctaaaatctaggatatgatcatgataagatgttagttgaattcaaattcaaatctagctcttatcttctccttttgatatgaaactatctactatagttaattcatatttaaattcaaaatttaaattatcaaatttaaatattagataattaatttaattatttaaattaattaataatgtcttggactatccaagcccattaactccattcatacactcctctctctttaagataattttctaaactctttcttgggccaacaaccgttattaggcccaaaacctttaatgctataatgtcatgacaataaagtgttagtgtgtgacccattagggccaacatagctactgacataaatgagtttgggcccaacaaggcctctacccatttaatgacaacacagagcactagcaatgctttgttgccccagaactagttaggtaaatgacaagatcttcctatcaaatctatttggtttccgtatgtatttcctttcgtctcggttaccttcccataaaacatagggtaaggaaacgtatcagcccttgcagtctagggtaagctttaatacgaaatagggagtctccaattttactgactctaaaggcaaatcatctcatgatttcttttactatgcatagagtcccgagtcctgtaaatgtcatcccaatttctccggtttacagataacctaatctctcacagagatttgacgaattccttcagctagtcaccctagactcgtgttctttcaggacatgcccaaaggtatacctatgtgtctccatgtttcaggcagacgaggtatacaatcaaagcatgtcttctagaacatagtctaggtgaaatcttctggtctaaggaaagacacacccaaataataaaagactactctaatgatactatctgtgagatttcctcatagagtctctttgtgggtccgttcagtgcgagctatacccttataggtccacccacgactttacctaagacatctccatgtctctagctcatgaggtctttaccttgtatctgcatacaagtagataagccgtgctagtcttacccgagatcactgatccccattttcagtgtctctagactaggaacttaaatttaggagtagacatctggtatccttgaatcctcatgatcgtgatcccatcactgatattcaagagatacctattctattccaagggttttatccagttactcatatattaataatgatatcgagacagaatatgaaacaagataaagagcgcttataatttattcatgacaattgtaagtacatgtatgatgtgttgcaaacacatcttatttctagcttagttttaggttatattttaattaaatagttaggaaatagtttcaaaaagtagttcttttaagtatttttaattattttaagcaattcaatactatttaagtatttgcaggtcaaaaagaggaactcaagagaaaataaaagaagaagccagattctgaagagccgcgcgagtcgcgccaaacccgcgttagtagcgtcaagttcagagttgaagaacaatcactggaagacaccacgcgacaagcgtggaaaccacgcgaccagcgtggaggacccgagagtaccacgctgatagcgccattatcatgcgagacgcgtcagaacctcaaggattaagggttttctcctctgccaacctgcgcgggtagcgccattatcacgcgatcagcgccattctttctgtcattccacgcgactagcgcggtatcgcgcgcgggtcgcgtgggatcgattttctttcctgtattaaagagatatgtttcgaaattaggtaaaggttttggcttagttactataattaaatggctctatatataggaggtttctgaacagaccaagacacagagggagacagaaacactttgagaatatagttgtaaccctagaattccataaatcaccattgcaagccctagaaatcaagattctgatccaaagttctgcacaacaatgttttattcatctgctttggatttcttgaggcctatggcaggctaagcttctattgtggaaaggccatgatcatataggaaagactttgaatgcttgaattgattaatttcactaagacattaggttatgacttcagtttaaagggttgattcactaagaaattagggattaactaatataggaaagacttattctccgagtaatcagaacacgaacccataagatttgttctctgaattcttagtttgacagaatcgctagaaggttagggttctcgatcgaattaaagggtgaaattgctagttatctagtatttacaactataggagagatttattttatgtaaacttcaagttaaaataatcagtcaaatgaaagaagtaatgatcataagggattgtgcctgaccacaattattattcattggtatcttcttagtttaaatttactgttttgtttaagtttcgtttttaatcaacacaatcattcaacaactttctgcgtaattttctgttttccgttttcaatcacaactgttttaattactgcaaaatcattccaatccctgtggagacgataactcacatacctactttattacttgttaacgatcggtgcacttgccgtatcaattcgcataaatcgcacaacaagtttttggcgccgttgccggggattggttaacggattttacagtagttttaaaattttgtgattgaaatttttgttactaactgcttctcctagtttttatgcgaagaacagttaattccgaggattcgcaattcgaccctgaaatagaacgaacaatccgaaggagattagctgaacaaagacgaagaagagaagcagaaaattctgatattgattcaaatttagagtcagattcagagttcgaaaaagatatggctgacgcacgaaataaccagcggaggcctgaggatgaactgatggaggacattctggctccaacgttcacaagaccgaactctagtattgtgagaccaccaattcaagctaaccattttgacattaatccttcattgatagctttggtggaacgtagccaatttggaggagaagatttggaagaccctcatgacttcatagacaggttccttagaatctgtgatactattagacaccaaggagtctccgatgacgctgtaaggctaagtctattcccatttgccgtaaaaggaaatgctttgaggtggttgaattgtcagacatctaatagtatatcaacttgggaagacttagtttcaagattttttgcggagtatttctctatggataaatataatcgattggtgaacgagatcaccaacttcacgcaaaatggaagagaaactctgtgtactgcatggaagagattccaagcactgataaggagatgcccacaatatgatatgcctgtaggtaagcaggtgagaatatttttcaatggcatgactcccgaaacaaggatgatagtgaatgttgcagccggtggaactataaggtccaaaaccgccacacaaacatatgagctgatcaactctttggcaagaaatgagaatgaaagtcatacacttcaaccaaagagagagcctattcaattgaccactaatgatgcaatgcttgcagagcaaaagattttggcacaacaattggccaaattgaatgagaagatagaccgattgcaagtttctgcagcacaagtggggacaagccagccatatattatttgtgagtattgccaaggtgagcatgaatctaacacttgccctattttagttggtgctgaccctgtacaggtaaacggtgtttggaacgatcaaagacagcaacaacaaccataccagcagcaacaatatcaaagaaacaataattatgcagctggaaataactatcaaagaagatttcaaggaggtggtttggattacaaatccaataactacttacaacctcctcctctcccaaataaggaaccttctgagcttgaaaaagtggtgatgcaactgtcaaaaaccacagcggaattcattgctgaaacaagagctcaccggactaatcaagatgcttccatcagaaacttggaaaaccaaattggccaacttgcaaaacaaatggctgaaaggtcacaaggccaatttccaagtgacacagttgtgaatccaagagaacatgccaaagcaattacaactagaagtggtaagatattggccactccggaagagcctgaaacaagcgctagagaaactgagaaaaattctgcagcaactgagaatgataaagaaaaagttgcagagaagttggaggagcaagaacctgtgcctccaccaaagaagtgggatttttcacgctttgaaaaacccccatatccaatattgacaaagcaacaagaacagaagaagcaatttgctagattcttggagatgtttaagaagttgcgcatcaacataccatttgcagaggcattggctaatatgcctaattatgcaaaattcatgaaggaacttctatccaataagaaaaagctggaagaatgtgaaaccatagcactcactgaggagtgcagtgcaattattcaaaggaagcttcctcctaaattgagggatcccggaagttttaatatccctatagccattggtaatattgatgtagggagagcgttatgtgatttaggggctagtataaatttaatgccattgtctatgtgtaagtctctaggcatagctgaacttaaaccaactagagtgtcattgcaactagcggatagatccttaaggacaccctccggggtaatagaagatgttttggtaaaagtagataagttcatatttcctgctgatttcattatgttagatatggaaggggagagtgagattcctctacttttaggaaggtctttcctagccactgctagggctttgatagatgttgagcagggcaaattagagctaagattagataatgagtctgtggtttttaatgtatttgatgcgatgaaacatcctaatgatgaacatgactgttttcggttggatgtattggatactgtgatttgtgcaggttttgaagcaggtgttgcagcagctgaggaagatacagaacaatacacaaccagcactacacatgaggaacatgtagaaaaatcagcaacagcagaccaaagacagcagcagaattttgtgacagcagctgtatgtaatgcagaaaaatttgcaacagcaaatgtttatgaagcacaagcagcagttaaagaaagatccagctctgaagatgcaaaggaaccaaatatggaagagctggaagtaaaggaagatgatattccttccggtgcaccaaaagttgagctgaaagaattaccggaacacttgaagtatgtcttccttggtgacaatgagacatatccggtcatcatcaacagagggctggaatggtttgaagaggaaaagctgatcaaagtactcaaggatcatagatcagccattggttggtctatttcagacctcaaaggtataaatccatccttttgtactcataagattttaatggaaactgatgttaaacctgtgagacaaccccaaagaaggctaaatcctacaatgaaggaggtagtgagaaaggaagttgttaagcttttggacgcaggtatgatttatccgatttccggcacaccttgcataagtccggtacaaacagttccaaagaagggaggtatgactgtcatacaaaacgataagaatgaattaatccccacaagaaccattaccggctggaggatgtgcgtagactaccggaggcttaacgatgcgactcgtaaagatcacttcccacttccttttatggaccaaatgcttgagagactcgccggtcaagattattattgttttcttgacggatattctgggtataaccaaatcccagttgctccggaagatcaagaaaagaccgctttcacttgtccgttcggggtgttcgcttatagaagaatgccttttgggttatgtaacgcaccagctacttttcaaaggtgcatgcttgcaatcttttcagacatggtagaaaagagtcttgaggtattcatggacgattttactgtttttggctcttgctttaattcatgtttaactaatttaacctatgtgttgagaagatgtcaagaaacgaacttggtgttaaactgggaaaaatgccattttatggtaagggaaggcatagtacttggacataaaatctctgaaatgggaatagaggtagatagagctaagcttttattaattgagaaattacctcctcctattaatgtgagtggtgttcgcagttttttaggacatgcaggtttttacagaagattcatcaaggatttctccaagatcgcaaaaccattaagccaactactggaaaaagacattgaattcacctttggtaaagcttgccttgaagcatttaacacgttgaaacaaaaactcaccactgcacctgttttaattgctccggattggagtttgccttttgaattgatgtgtaatgctagtgattatgcagtaggtgctgttttggggcagcggaaagaaaaacgattgcatgtaatctattatgctagcaaaatccttaatgaggcacaaactaattatgcaacaactgagaaagagatgttagctgttgtgtatgcacttgataagtttagataatacttagtaggttctaaagtcattatttacactgaccatgcagcccttaaatttttgctgcataaacaagatgcaaaaccccgtttgttgcgttggatgttgcttttgcaggaatttgatcttgaaattagagacaaagctggggtagaaaacaaggttgcagaccatttgtcaagaattcagcataaggaattgcaagatggaccggaagtggagattaatgaatcctttccggatgaacaagtgcttgctgtgaacactactccatggtttgctagcatggcaaattataaagctgctagagttatacctgagacattcacatggcagcagagaaagaagtttctgcatgactcaaagaggtatctgtgggataatccgtacttatattttcaatgtgctgacaatgttatccgcagatgtgtagctgaaaccgaagtgccaaccattctatggcattgtcattcatccaattacggaggacacttcggtgttaatcgaactgcgcagaagatcctacaatgtggctattattggccaacaatattcaaggatgcaaaagactttgtgatgcaatgtgataactgccaacggactggaaatgtatctcgccgagatgagatgcccttgaacaacatacaagaggttgaattatttgatgtatggggtattgactttatgggacccttccctaagtcttttgctaatcaatatatcttggttgctgtggattacgtttccaagtaggttgaggcaactgcattacctacaaatgacgccaaagtagtcatctcatttttaagaaagaacatatttacaagatttggagtgcctagagcaataataagtgatggtggaactcatttctgcaacaagcaacttgagagcttgttggctaaatatggagtcaagcacaaagtagcaactccataccatcctcaaacaagtggtcaagtggagatctccaaccgagaattgaagcgaatcctagagaaaacggttggatcatcaaggaaagattggtccaagaaattggatgatgccttgtgggcatacagaactgcgtttaagaccccaattggtatgtctcctttccaactcctctatggtaaggcttgtcatttacctcttgaacttgaacataaagcaatgtgggcaactaagtttttaaattttgaactaaccaaagctaatgacaaacggttgcttcagttgaatgaattagatgagttcaggttgaatgcttatgagaatgctcgtatttacaaagagaaaacaaaaaaatggcatgacaaccacatcagacctaaggagtttgttccaggccaacaagtgctactctataactcccgactgaaactttttccaggtaaattgaaatcgagatggtctggaccatttttggtaagggaagtttttccttatggcacagtggcaatttcagccttggacaatgataaagcatttaaggtaaatggttataggctgaaacattactttggaggtaaggtggacagaaattcaagttctgtaccactcaaagctaatgatgaataaactgcagtaagtgtctagcttaagacattaaacaagcaccgtctcatgtatatagtttctaatttaagttggtagcagtagtttgtgattctgcattattttagttcatacattattgttattactaagttttgttgaaatttaaatacgtaggatcacttagtattagttttatctatttcatgtagaagtaattaggtagtttagatgttaggctaagaaaattgagagaaggaagaaaaatttagaaagcctgtcaagggaagccacgcgactcgcgccacattccgcgcttctcgcgccaaacatactgctctaccacgctagtcgcggggatgccacgcgagtcgcgtcgtctgctctaaaagcatttaatatctgcacaattccacgctaatagcgtggataccacgctagtcgcgccaaatggcagtacccacaagcactattccacgcgactagcgcgagaaaggacgctaatcgcgtcatacatggaattccagcagaccttccaaggcaattcacgctaacagcgtgaatatagcgctggtcgcgcgaagttacagagagaaattgaagttgaaacgaccaactcacgcggatagcatgaaatccgcgtgactcgcgcgaaataccagaaaccaattgagcttgcactggagcatgacgcgacaagcgccatttatcgcgctacccgcgcgagttcgcggatacagtttttaatttaaatttctaaatcgtgcctttcactctcactcttccgaaatcctatccgtctctctcgccctaacctcctctaacttccccaaacttcctcaacctccataaactccctctaatatctctcaatctcattccctctttaaaaggaccacattatctgtatcccaccatatcattttcattcctctctcacacttagcctcatagtacttctctgcactgcactgcattcactacattcgaattgaacaatggcaagggaaaaggtatgtctaatcttaaattactttacattgaataatggcattcataggaacacaatgattagtgctcaagttctcacattccaattatgacaacacctttgaggaccctaggtttagccacattttgagctttcataaatataattgctcaattctcctatctcttgtctgtgctctgttggtttttcaaattttggggtttttgatggttccaaatagatatataatactgatttagaatcttgcctgctatatattcgataaaatgcctgaatgagaattgaatgaaattagaaccaaaatgaggtcaataggcataatgtgtggaataactaaaatgctatgctgggaataccattgtttaccattagacatgttctggaattgatgatttgatgtcttaggcttgtcatattgatttaatgcacacatctgaattataattataatgcactaaccatagctataacaattgaatgaatggggtttggtgctttaacctaaaattagaaatgctattattgttctgtatagtatcaattcagattgttttgaattcttatggatagtatcaattgagtctaataagtctgatatggatagtattgcattgttttaagtgtaatgggggtaaccaaagaaaaatctgggaattgtggaagttactaaagcttcacccaaaacaggaatcaaaattgattcactttgtgcctaaccaaacatgaaattgtttcctgtgtgataaatgagaaatacttgaaacattatttgctttataaattaatgctctgtgcttttgttatgactatatcctgaccattgggttattgcactataatgttgtctttgttcgaaagacaggatattagcctaatatgaatatgaagttttaaaattgaaacatgcataggctaattccataattgaaagtataatgataaagattgaggtggaatattagtggactgctgaaaatatacattgttgatattgaatgaaacatgactaagaactttcatctgggaatcattaaccattacttatcaatatatattgcttgaattcctgagacatgcttgcttagattctgaacttattataattctgtttgcttaatataagtggaatacaatgaaagactcaatatctttgcttgcctttgactgtattgctataaaaatctggaatcttaaccacgttgaagtacatggtgctgttgctttctataccctgttgaattgaaatatgttaattgtgaaatgctttgctttatgttaatgagaccaccaagggtataaaatctgggaattgttgtacatagtcatgattggtctgttgggctagaaccgggattatttgattaagtgctggaactaaactactattactctttttatgattctgcattaggataacttccttgtgcttgattgacttacttccattaaggaaacaaatctggaaatcctcaaatgtttaataaatatatatatatatgcttgaatttttctgattttcagggcaaacagattgaaaaagccaaatcagtagttaaaggaaagaagaaagttactggagaaagtagcaagaagcgggccagaatttcagattttgacgaactccgcttccggaccgctgactaccaggaaaagtttgatgcctggtatcttcccaagaaaataattaaggagcggaagattatgtgggacaccttccctgaagacaacccgattcgacaagttattatccgaagacagtggcagaggttggtgactttcccagagcagagctccagcacgatcttgaaagagttcttggcgaatgtggatcatgataccgtttatcgcaccagatgctcttgggtgaggggagtcaccgtcccatttggcgagaggacgatagagagcctgctagacaccgattatgacccctactccgcatgtgacttcagcaaattattcatgcacatgcagccggacgcggtgacgaagatgtataatgatgacgtcccagagctagccatcactattcgccatgctattactggtttatacacggcttggaagtccaagcccggcatcgattacataccagaaaagctaaagaagtccgaattagtaggagatgcagctttttggcatcagtttgtgaaccacacggtcattccctctactaacatgaccgatgtgaacgtagagagagctattctcttatatattctacgaggggcaggtaatcttctgatctcttccatcctatctgatcggattttgcatatgacccagatgccagtagtaagtcctggttaggtcactcctcccttatccttcttctctgccggcacgcgggggtccacattgacgaggacgaggccatggacgtaccgatcgcaccactcatggtctataagacctacctgactgccatggagaccgcagcggacgagcaggtggttagagcttctaagctcaaacctgaggagatcgcagctgcttcacctcgagatgtacccgctattgaggacccccagcctgatcagccagccattacaccaccagtctcgcccattccagcagcaccaccatcatcttcgatgccacctccttccacagtacccatgcgcactccactatacgaggactcaccgagcctacttgccttccagcagtttgtgaggactcagctggagtttcagaatgcgcagttggagcttcagacgcgtatgtggggagcagtgtgccgtcatctgggcattcatctttcagagtatcagattccagctccaccacagacaccagcaggtcccgcagctacagatcccatcgaccaggcatccgatgcagagttgtcacccagccgttgaattctgagcacacagatgtggttatgactgcagaggaccgagatgcaacagattgaccaggaccttttatattttactgttattttctagttcagacttatgtttttgtgttattttagattctgcactacatacattttattctacatttacatttacattacatacattttatagttctgcatttgatatatagtacaacttatcgtttatcatatttttttatctgtttcgaccaatgtggattgaatgcgattttccgaataatgcttcaaaaattttttccaaagcgctatgaccatgtttgtggttgctggggacagcaacatataaatctgggaatggttacgcattatttcgcaaatcacaatcaagaaacaaatgaagtctaacagaactcttgcaaaatttttataataaccagaatttttcttaaaaataagcagcacacaaaaatttttcagattaaaagtaattgaacttagtgatagataggattcatggatgaagcttgatgaaataaaatagaacatggactgcataatgcatgactggaatttgattgttggtatgtgaaatgaatgttaaagctaaatggatgcttgaaatgcagtcagatgagatgggaattgagtactaacacctgcaaggttttgagccaaacacggtaaattctttccgagagactccgatttcattgtactctagaacttgaattgtttctctggatgcaggtacgacttgaaatgattaaggcacatttttctctttagctagagccaaattgactaaaccttcaagtatttttccaattgcacctaatttgagcctaagcttttcatttcaaaataacccaaattagaaagctacatccaaatgaccaaacccttggggccagagaagttgatttaagtctatgataagggattgttcatcaggtatcaagaagcataaataaatccaatgatggtgaaaaacaagaatgaataagcatgaaccaaattggaggccaatgaaccatcagaaaaattgtgaagctgcagtaattttcattatctatgtattgatatgttttgtttactttaacaaaaaaaaaaaagaaaaaaaatttagtattattcagttttaatagaatatatgaatgaaagtaccaggttgtgaaaaagaagacaagaagtatggatttaaaggaatggatctggcctctcattaaactactatccaaaaatttatcctacctttagcccagccatattacaagctggaaagatcttttgatcaagtcataattgcaactgttgagaatatcttcaagcttatggtagtgctgtgatgttgttgagtaagagggtaattataaccttaaacacttgagtgaatgagtgactaaatacaaatctgtgagaaaaactcaagttactctcattgttgatagcattgaaagtgacaagaatagctttgatttgaattgatcatacatagcatgattattctaggattgtaggctgtggtttgtgtttgattattgattcttgctaagttttgaattcttctgttgctagggacagtgtaacaccccggacgtctccggcatgttatcatcaatgatattcataacacgctatcagagttaactaagcgcggtgcggaagcaaatagaatcgtttatcttgattacattatgcatgaaatataaaaccacacacacaggtcaggaggaaacacatttatatacatcatcatcatttatacacatacatgctcaaaaacaagaccacagctgggtcatacattataatatgtacaggaaatgggtatacacataccctacaactacacagagatctaagaccaacttcactcttgaagctctgccctggtcttctactgcagcctcacgtccagcctatcaagtccactagggcctcctgccctgaggtcgctcctctcctcaagaagcacctgtaaccacaaaccccacacagggtgagacaaacgtctcagtaagctcagggtactgggagatcgtccctaaccctggtttacctacaagcataaaatacagaaaatagtcataacacagcctaggatatcatcctggctatcatacatcccagccatctggatccataaccggatgctctcagcatcagaggtattccacctcatcctggctctcacagcctgtctcacagaggtactctattgtcagtgtcatactccggacactatccacacaaaagaggcaccgcctctaaaacacacatacatcgcctgaggagatccctccactcaggacttgaaaccatacaaacattgcctgaggagatccctcaactcaggacttaaaaaaaaccagacatggctcatcagagaggccctgggctttagtccccccccctcgggaagccctctcttagaaatacagcatatctatttatcatctggcctggaaatagccctccaggacttccgaatcaacacttgcctaaggaggaacctccatacagggcaatccatccttaggacttcagtggagagcagtggcacctcccaaggaatctcagctattcctgggagtcctcaaactcttcctctggctagggaacctcaactagcccgataccagtctggtatcctataggttccatcacagaccacctcatggtctgcatctcatcagaatcactgaacctcacaccgtctcagtgtctatcctagggttcatcagatattcagattttccagaacggcctgagttccactccaagaaccgttctcagcccttcaggcttacagcacatataaatatattaagcataacatgcattcagcactccacttgagtggcaaaccataatcagggaaaaactccagaacgatgagcttacctggcaagccgtgccccacagctatagcctcgtctgttggtctgcttctctgacacccacggtgtcaaaccctaccaaggcagacaaacatatatcacagaccatacaagcatcaaaacatgcataagctcatcgagcagacatccactgcctctgggaaaggaaccacagtccttcccatcaacctgagcatctattctaaggtttataaggctcatccatcacaagcctttccatagaccctcagtggtctatctcagatcaaccatggcctcagagtcattctagactcatccacaagccattcatagagagcttaaagctctaacagcccaaatcctccgggtttctcagggcttggacggtctatctcaccagatactgtctacatggcctatcaggcatctcaagcccatcacaaaggctctggcatgtctcagatcaagtgactcagtccaagtcacacatgcctcacctagagccaaaaccaacagtctccaaatcacaaattgaaagctaatccttcctcctcacatcatactaaacccttctctcaactggacccagagctaattccagccctatcacagatgggtcactattcacccaagacccccaatcagaaaatcaaccggagaaactcgagtttcttacctcaatggcgacacagacgacctctggaacgttcctcgtagctccagtgtccgtgggtagtcgccgttcctcctcaatctcgagttctctcaacctctctgaaggtttcccagaacttggggttttagggaatagggaggaaggattctcgctctcactcagatataaggaggtataatcggtgcaggaaggattttagggtcgcaaaacaaggtcatgggagcttggagagctctcccatggctgccagggtccagaggaagaagaaaaccatgttttctcccctcaaaacgcgaccttcgttcttataaaagcttcaccgaccttcccacgcgactcgcgcccgaaaccacgcgactcgcgccatactctcggcccttccacgcgagatacgtgaacatccacgcgactcgcgtgaacctgccgagacaccgcgcgactcgcgccatacccccacgcgatccgcgtgggaaaccagagaaaaactggttttccagaccactttccacgcgactcgcgtggatcttcaagtggctcgcgtgacatggcagagccatctgccctgatttacacatatgacgcgcgtcgcgccacatcccacgtaggtcgcgccatattccagaaccaccagtatctctctttctcgagccttttcgctggatactcttaagcatgttcatcatccttaatcatggccttgatctaggcttaattacatgcttaaaataccgggcattacattacacccctccttttaggaattttgtccgcaaaattcccaaatcccaacatatagtccttcctaggacttgtttttccttataggtcgtgtaggatctatcagattctctcaaatctgatcattgtcgggcttcccacgtgatgtttccattacatcattacctggaacacatggcaactcttatgccatcaaggtaactgggaggcaacctcctctccctcaaagcccatcctacacctgtgaccaaagacagcctcagacacctctggttacccttactaactgtcagggtaggtgtctaggattacatatctcattttacggactctgagcgttcaaacctaactctgatcctctggatctgctcaagagtctctcaaaccatcccaggttcatgaagctgtctttgcctctatctctgccatatcaatgggagtcctgcacccttggcctccacggcgcctcatcaggtgccatgtttctctaacatgtgaactttcacgatcaaggaactccatctaaggcagatcactaacccagccagtaccttgctccaaggtacgctcacacaacacatcctctaggatctagatggcccgctccatctgatcttttatctgagaatggtaggtcacactaggcctcagctgggttccaaaccttccgaagaacacctcatacccagaggtaacttcggatcactgtcactaaccaagtgacatgtcatacacttgctgtttctacagctatgtcttacttcatccctggccacctgaatttctctcaagatccagacacatcacagtggcccttggatgattatccaacccatccctaaacctcagaaggatggcatctaccagctctctctctcgctatgcaccctcatcaggcttagctcatcctaagctaggtgctttccaagagacatcttgctggtataccatagccctcacagccacctcctgcggctgggcctcgcagatctccgctgcgctactctgatcaccatcacttggtccctctcaaccatagaccagatgatcccttgtcatcgacaggcctatatctctgagctgctcacttagctcacagtcaaagactgttctcacgcatggatcactcccatgctatcctgctcgagatctcagcacatgtccaagcctctgctgggacgcatctcaagcaaactggtcacctgacctggccctctggccctcctatctatttgagcaggcatctgctctaagcacatggcggaattacctaaacgcccagcggagctacctcaacgctgataacaaatagatggcggagctacctcaacgccaatatcacatcacacacctggcaaagaaccctcaatacatggcggagtatcactcaacgcctcgcggagaaccctcaacgcgaatacacatggcagagaaccctcaatgcctggcggagtatcactcaacgccctgacggagctcctcaacgtcagtatgatatcatcatcataaatctcaacacatgacaggtggcagagatcctcaatgcctggcggagatcctcaacgccactgacggagatcctcaacgtcagacctgtcatggtgtggcagagatcctcgatgccactgggcggagatcctcaacgcccatgatacggagatcctcaacgcctgtatcaatctattggccaatcacatgacaggtggcagagatcctcaatgcctggcggagatcctcaacgccactgacggagatcctcaacgtcaaacctgtcatggtgtggcagagatcctcgatgccactgggcggagatcctcaacgcccatgatacacggcggagatcctcgacgcctgtatctatctattggccaacagatatatccaacgcagatacatataaaatcaatacaactaatgtcatagccaaaacatacagcatgaaacatgacccacactccagtgtgtgatctggactaacatacgtgtcgtcccctcgggaactatcccttgcacagggacgcacgtctatggcacctccgaggtatagaaggagctcctcaacttctatcctcttggtctgtacacagttctctgggagctcctcaaccagagaaaaccaactaggagaaaactcctctcctagggaggtccatctcaaactatctcagcggccaccgcttcctcgaagcgtggtactctccatcacctctggagaactaacatatacatctacccatgtatatgtactaggtatataaccataccttatctctggtcagaattcctctgacatctcatctagtacctctggagactctatctccgtgattgtcctcctcaggacacatcccacatagtggctctactggccacatacaaaacacatcagctgacctgtaagactcactccccagtgaggctcctcacaagcatcacactggatatctcaggcctctgccgctctcctcggcgactgggcaacctcaggcgcctcagagctgtaactaaacatacaactagctccgcgcctttgccctgcacaactgggtcagcatctctgggtctcttcctaccctttgccccaccgagtaagtaaactgcttatctcggtgtctactgagtccatattcacttggcgatactatgtcaccaagcagtccctgactcaggatccactgcccgtcaccatcatctctatatcctctttaagtcccctctggaacttagccacgaggacattaacatctggcatggatcttctgccctgagcatacttggccagttcatccaacctagccaaacactcatccacagtcatgtccctccctggactagactgtcaacctctacctgattctgctatctagcatccctgggaatctactcatccaagaaacaggcctcaaacattagccaggtaagaatctctccccggcccatctgcagtgccgctgtggtcttccaccactcatggtatcaccctgcagcacgtaggtcacataccataacccctggtgatctagactttcatcgcctcatagaccttctccatagcctacagctactttgctgaggcacaaggtcataaccaccatggtaggctggagggtcatgcttacaaccgataagcatctgccctcaggctgcacttaggtctctgtgacaacatgggacatctggtcccctctcaggtggatcccaccaacctgatggcgacttcctcgccctcatactcaggaggtgtggggaacattctgtcacccctccttttagctcagacctcctctgtcaactcctgacgagccttcatcaaggcctcatacctttctctgtcagcagccctctgccgctgcatgtcctcctgaacctgcctatatgcagccaactcttgctgcatggccgccatctcggcccctcactggatcagactgaacactgatcgccctactgtggcttctggatctcgacatgacattacacatgtacacttacagcgagttnnnnnnnnnnnnnnnnnnnnnnnnnnnnnnnnnnnnnnnnnnnnnnnnaatgatattcataacacgctatcagagttaactaagcgcggtgcggaagcaaatagaatcgtttatcttgattacattatgcatgaaatataaaaccacacacacaggtcaggaggaaacacatttatatacatcatcatcatttatacacatacatgctcaaaaacaagaccacagctgggtcatacattataatatgtacaggaaatgggtatacacataccctacaactacacagagatctaagaccaacttcactcttgaagctctgccctggtcttctactgcagcctcacgtccagcctatcaagtccactagggcctcctgccctgaggtcgctcctctcctcaagaagcacctgtaaccacaaaccccacacagggtgagacaaacgtctcagtaagctcagggtactgggagatcgtccctaaccctggtttacctacaagcataaaatacagaaaatagtcataacacagcctaggatatcatcctggctatcatacatcccagccatctggatccataaccggatgctctcagcatcaaaggtattccacctcatcctggctctcacagcctgtctcacagaggtactctattgtcagtgtcatactccggacactatccacacaaaagaggcaccgcctctaaaacacacatacatcgcctgaggagatccctccactcaggacttgaaaccatacaaacattgcctgaggagatccctcaactcaggacttaaaaaaaaccagacatggctcatcagagaggccctgggctttagttccccccccctcgggaagccctctcttagaaatacagcatatctatttatcatctggcctggaaatagccctccaggacttccgaatcaacacttgcctaaggaggaacctccatacagggcaatccatccttaggacttcagtggagagcagtggcacctcccaaggaatctcagctattcctgggagtcctcaaactcttcctctggctagggaacctcaactagcccgataccagtctggtatcctataggttccatcacagaccacctcatggtctgcatctcatcagaatcactgaacctcacaccgtctcagtgtctatcctagggttcatcagatattcagattttccagaacggcctgagttccactccaagaaccgttctcagcccttcaggcttacagcacatataaatatattaagcataacatgcattcagcactccacttgagtggcaaaccataatcagggaaaaactccagaacgatgagcttacctggcaagccgtgccccacagctatagcctcgtctgttggtctgcttctctgacacccacggtgtcaaaccctaccaaggcagacaaacatatatcacagaccatacaagcatcaaaacatgcataagctcatcgagcagacatccactgcctctgggaaaggaaccacagtccttcccatcaacctgagcatctattctaaggtttataaggctcatccatcacaagcctttccatagaccctcagtggtctatctcagatcaaccatggcctcagagtcattctagactcatccacaagccattcatagagagcttaaagctctaacagcccaaatcctccgggtttctcagggcttggacggtctatctcaccagatactgtctacatggcctatcaggcatctcaagcccatcacaaaggctctggcatgtctcagatcaagtgactcagtccaagtcacacatgcctcacctagagccaaaaccaacagtctccaaatcacaaattgaaagctaatccttcctcctcacatcatactaaacccttctctcaactggacccagagctaattccagccctatcacagatgggtcactattcacccaagacccccaatcagaaaatcaaccggagaaactcgagtttcttacctcaatggcgacacagacgacctctggaacgttcctcgtagctccagtgtccgtgggtagtcgccgttcctcctcaatctcgagttctctcaacctctctgaaggtttcccagaacttggggttttagggaatagggaggaaggattctcgctctcactcagatataaggaggtataatcggtgcaggaaggattttagggtcgcaaaacaaggtcatgggagcttggagagctctcccatggctgccagggtccagaggaagaagaaaaccatgttttctcccctcaaaacgcgaccttcgttcttataaaagcttcaccgaccttcccacgcgactcgcgcccgaaaccacgcgactcgcgccatactctcggcccttccacgcgagatacgtgaacatccacgcgactcgcgtgaacctgccgagacaccgcgcgactcgcgccatacccccacgcgatccgcgtgggaaaccagagaaaaactggttttccagaccactttccacgcgactcgcgtggatcttcaagtggctcgcgtgacatggcagagccatctgccctgatttacacatatgacgcgcgtcgcgccacatcccacgtaggtcgcgccatattccagaaccaccagtatctctctttctcgagccttttcgctggatactcttaagcatgttcatcatccttaatcatggccttgatctaggcttaattacatgcttaaaataccgggcattacagacagcaactttcaaatctgggaattgtttgatgtgttgcaaacacatcttatttctagcttagttttaggttatattttaattaaatagttaggaaatagtttcaaaaagtagttctttttagtatttttaattattttaagcaactcaatactatttaagtatttgcaggtcaaaaagaggaactcaagagaaaataaaagaagaagccagattctgaagagtcgcgcgagtcgcgccaaacccgcattagtagcgtcaagttcagagttgaagaacaatcactggaagacaccacgcgacaagcgtggaaaccacgcgaccagcgtggaggacccgagagtaccacgctgatagtgccattatcacgcgagacgcgtcagaacctcaaggattaagggttttctcctctgtcaacctgcgcgggtagcgccattatcacgcgatcagcgccattctttctgtcattccacgcgactagcgcggtatcgcgcgggtcgcgtgggatcgattttctttcctgtattaaagagatatgtttcgaaattaggtaaaggttttggcttagttactataattaaatggctctatatataggaggtttctgaacagaccaagacacagagggagacaaaaacactttgagaatatagttgtaaccctagaattccataaatcaccattgcaagccctagaaatcaagattctgatccaaagttctgcacaacaatgttttattcatctgctttggatttcttgaggcctatggcaggctaagcttctattgtggaaaggccatgaacatatgagttaccttctgtaatttgactggtattgaatgcatatgttttgtttactttaattcttttctgtgcttatactttatcttatttagaattgatcactctagatgagtactgagagttataattcacaatggacacgttgggattgtaatatctgacttgttaagaataacacttgttcctcacctagactagggatgcatgagtgcggagtttataatatgttctttgaatgcttgaattgattaatttcactaagacattaggttatgacttcagtttaaagggttgattcactaagaaattagggattaactaatataggaaagacttattctccgagtaatcagaacacgaacccataagatttgttctctgaattcttagtttgacagaattgctagaaggttagggttctcgatcgaattaaagggtgaaattgctagttatctagtatttacaactataggagagatttattttatgtaaacttcaagttaaaataatcagtcaaatgaaagaagtaatgatcataagggattgtgcctgaccacaattattattcattggtatcttcttagtttaaatttactgttttgtttaagtttcgtttttaatcaacacaatcattcaacaactttctgcgtaattttctgttttccgttttcaatcacaactgttttaattactgcaaaatcattccaatccctgtggagacgataactcacttacctactttattacttgttaacgatcggtgcacttgccgtatcaattcgcataaatcgcgcaacaatgtacgtcctaatctaatgaaaagattgtctctaggacatccatatactaacacaaagttcacagaaagatatttaccttgcatcgtacttgaatgggtaactaaaaatgcacaaaagaatttaagtaatgaatgtagtagaataacttctttttctccaatgcagtgcacattggcaactagtccttatctgtcctaaggccaaggttgtcgtgtggttctattcgttgcacaacaggcctgataactacctgaaaggaattattaacaggtaggttgtaatttgtaagacatttctattattatttctaacacatgaatatgttattgtacaatatgcatgcatgtttgtcttaagcaatgctttgaagggagtccaggacactcaaggaaataaatcaaaggctactactaaatggattacgcttaaagtaagtcttttaataaatcatggtttatgcattcaaaataatttttattactatttacactaatttccgtttaactttgaccatgtttttgaatttagtgtaataagcaaaaaggaagcactgagtgtggctattatgtcatgcattggatgtcaacgatagtccaaggagccttcagagataactaggacacagtaattgtctaattgaaaactaattttactttttgacccaaaagatgagaacctgcccacaagatgtaggtgccatttgtggcaaaagcgaggaacgagtgaccgcacccttgtctaacggattgggctaagagtgggggaagatttagtctttctgccatcggttacagtcacagcactttgtgagcatatatatctggtcatccctttcatttaaattaggaatctcacatcccgatctctttttctgcctttcatctttccagtcgagcagtggttcctgctcttgcctctctattctatgtccgttgcttgttcccttgtctttcaccatggagatgtgattacaagatttggatgccaacaatctcgataaaacgcactgttcatgccaatacacaagggtgacatgaagaaaaatatcaaaatttcccggttttgataccattttattactgacatgacgaaaaagaagcgaagtggactttcccttgaacgaatgattcttcctttgttgagatagagtcggcaaactaagctaagcattttgacattttaaaaaagaggatcctaagttgtcaagatgggcatataaccagtttttacttgtttgaggacgtaaagcgggcattgatcgatagtacaccttcatattcatattctttattccaatttggctggttcacccgcgttgaacgtgatgagaatagccttttccagcataactaccggcttctatagtctagctggaatccctccccctttcggggtcgagttacttcgttcccttctttttttgccaatcaatatcatttcatgttccaacctgggcattatggtggagacaccagagatcacatctgatcctatgatccatcctgaaattcaaattcattcttggtaggtttcacaatcaaaccttccagggcaaaatgggtttaggctttcctccacccaacagcagtagattgcggcatctcgcaaagctatccattctaacctgtctttgcctagcaagatacgtctagttctccctctgcttgcctatctcagtagaaaattggaacagtctccgatttcaaaggagaagccggggcaagagctataccttctggaaccggagcaataactgctataaaggaagcagatgcacaggaacgatccctaaagcaaatactcggaatgctccacgactaagtatacccattcacactcgcttttgttcaattataaataactatccagtttgatggagatttatagcatcattcaagtatatacagattgagatcgtagagatatgagcttgtgatatagctacacctaattccggaccggttaatgcaagaactataaataaaggaccaagatctcctatgaaatagaaaagatcattcatacatagcatagtccaagctgacccacttaaaatctttattgaactatgaccggccatcatattagcaaataaacgtattcttgagcttaatgcacgaaaacaatgagggattagctcaaagagtactaaaaaaggtgctaacggctgtgggactcctgcgggtaatgagaagcttaaaaaatgaagcccatttctttgaaattccactatagtaatgccaataaaaatagaaaatgagagacccaaagtaatgagaaaatgacttgtaactatgaagctataaggtatcataccctggggattacaaaataatgaaaaagtaaaagtgactgagatgcaagggaaaaacctttgtttcacatttccggctatttgtttgtttactagcttcggcacgaaatcataaataagctctaccaaggattgccaagcattgggtactaactttcctcctccatttttagtaacaaaatgaaacaacaataagaccaaactgagagtgagcagcataaacaaagagggatttgtgaatgagaaatacaagtcacctatcttcatatcaatcaatgggattatctcaaattgatccaacggactgttaatggtgtccgccgcacaaggagcaatcgtgaggaatagccattctaatttcatttgctttggttcattttttaactgcttcccccaacaagaggaaagacttgtttgttgtaaatcggtggttgggtttaccaatcaagaaagacatgggactcttttttgtcgttgcttggatgtaaaccaagtgcttttcgatcttaggctatctcaggttgaccgtctctttggccccgtttcggtgcactattggagagctctttgggcctgtcgctttctccatcgataatggaaaactgtaaacattagcgtacttttcgatctatcactaatgtcatttctcaaaatccaaatccattacataattaaagaattaagtcatcgttccgtcattcaacaacctttccgatacataattttgttagttaagagaacttgttcattcacttggtttcttttctatacatagattggtctttggttaaatggttaagacaaccaagtagcctgttcgtttagtaaacataagtgcccaactcttagaaagaggatgaaccctaagaaagctatttcaatcacttagtgggaaaaagtagactatggtatgaaagaatcacttcgtccttcctcttcaagaccaataactaggtagactgagagcaagaacaaataaatgcctaagtcttctattggtctatgagttgatggtggtctaatagacctaggggaacccggaagtgctcgaagtcttctagtccatctcttacccaatcctcaatcaaagagcttaacataagctaagcctccaaactaagggatgagttgagtgaaacttatttctcgaaaaaagtactcatcttgcttcaggtggtgaagtgactgctgttgaagtagatcgagtctatgcttttcctagtctagccccatgctctcttttcaaagtagtaagtgcaggagcagcagtcgattcttctatcattcgaattgtttcagtcttgtagcgagggcctgtcgatcgagtcaatgtctttctggttgtgtaagggcagtcactgcaatcagaaaacaagaaaattcctagcttggggtcaagagttataaagtctaaagaaaaaggaaatatattcatctgcctctccggtcctaaggcataaccatgcgatctttaggtcatctggtggcgtgtaattggttttttatacatgtctgggcaggtacgatttaattgaaccattaactcagctaagacaagtgaggtatggttggcatcattggcgataaggcatttttctcgtgttatagcaaaaaaggcctgtggggtcagtgaaagcttaagttcctttgatgtggaagggctttctcagcaagagtgctattatggaggtttgtggaagtcattccaagtgctatgatggggaatagatggaggagggcgttgattgggtaaactggaaagttgaaaggtgctggcatccttacaggatgaatctgtataagaaaaccgatgttaacaggagatagttagcattgattttccacgtttttaagaaaaccgatgttaacaggagataatcaacatcagttttcttaaaaacctggaaaactgatgttaacatgcgatagttaacattggtttttcaatgaaaaccgatgttgttgttattataaaagttggcccgcaaattaaacacccttcactctcgtgcctatctctcactctgagtctcgctcttcaccttaggtcactctaacggcgcttcgaatcacctggatcgtgttgatttgagggggagttgcttgaagcacaaagaactttgaagtcaagaaaggattattttggactttcaacatgtccttgaagcattgaagaaaagcttgtgatcaaatgtaaaaggaaggaagttttctgatgattcaagccattgcattcataccattcataagtttaagaattaaatcacaaagcattggaaaattgttttgagtttttgaaatgaactaagtgtttttggaaaaatagcatctcactggattaatcgattattatatgcaaagaatcgattattttgttcttgatgttttctggaaatttctcaagaacagtttaatcgattacactatcgaattaatcgattattttggcttagatcacacataatgtaccttggtgacttttttaatcgattaccaacaagctgtaatcgattacatcagccaaatagaaaatatcatatctctggtttaatcgattaccaatcattttaatcgattacatagttcaaacatattttttcactatgccggatttaatcgattaccaattattgtaatcgattacatagtacaaacacatttttcacagtgccgggtttaatcgattacacgttggaataatcgattaaattgctcgttgtagttacccagaatcaatatgaacagtttaattgattacaggagcgtatgtaatcgattacaagtgctaaataatcgattacaggagcgcttttaatcgattacaagcggttacaaaaatcactataaatagaacccatgctcagctgttttagtaacttgagtaattcgtattctgagcattctaaggctttctaaacattctttagaagatttttctgggttcattgagtgcttgcttccataaaaactcatatgggtctttagggataagtgaagcaagattttctcttttcaaagcttaaggaaagttctgttctgaatttgtaatttgcatacaacctggtaaaagcattcttatgcatttcattcttggatcatcaggtgacctctttccttattctttgatgttgtaattcctgtttgaatttgtgttgatttgtctattgtaaatgtgtttcttgcttgtaatctagagatagtgtttctctaggggatttgctgagtagtgttctcagtggggtttgtctctaagaatctaatagtgttttagatttctgaactttatctagggttgataaagagaggcttgtaatatcttgtaagaactgaaatttacaatagtggaactctactctagtgttgagtagaagaaaactggatgtagcttcatattgtttgaagtgaaccagtataattccttgtgtgcttatctaatcttgcatatttgattgtcttttgtgaattcttgttaactacttgattcttgaagcattacatctcttgggttgatctttggataaaggttcttggttacaaaagtgataaagatccaaaaagggaaaaactctgattttgatcaataaatttttaaattaccaagcctaaccaattcgcccccccccctcttggttaagtgtgaagtgttccttcttttacagatcgctctcattgtcgatgttgggctcactttcacgatggttccactgttggtgtcgttatcgggctgtgcttctctcgctcacaactttcggaggctcccacaaggttagcaacttccattgacaaaaccatggaagtaacttctgtagttacttgaaattaattgtttgtagtttctttttctgtttactagcaagaaaaatcgtgagctaagggaacaaagcctcaccaacttcaatcatttgtgttgttcgtagtgtttcatcacgaagaggcaacaaaactgtgagccgcttataccttttctattgtgttcaaatttcttataagctaggtagcatgagtagttgatgggtcagtgatatactattgagctgaaatgttaggtcattttgaagcaaaatgagtgaagtttggaaaatcataagctattgaataatgaagaagaattgatttttttgtttgtcatggaaaatgcattaaagcccttcaaacagattggggggtgagtttcgtactttcccctcttaccttaatgagttaggcattcttgatagactttcatgtcctcatacccatcaccaaaatggtgtggttgaatgcaagcatagacacatagttatatggttggcaatggatacactttgccaggtcaacctatcatttagattgtttgagttcattgagcgtttgagctgataaagtgtgttttcatagagctccaaacaatattccgatgcagacttagctcgcttgtccttgaaattattaaagtccatgtttgagacaagtttatgagtcacaatggcttcctccatggtaaccttaagggccatatcatggaatgaagaaaatgaagcatctagggatgataatgtgttggtaatgctaatgtcaatgtaacgcatgcacacatggggatagggggtttctttgtatgaaagttgtttgccatgcacaaccaagagagaataaaaaacacagtatacaatgaaaaatagtttgtccatttagaaaatgaaatgatcaaattgtttttcaattatattatcgagtttgttagccaagagatcgaggatcattttagcaatgcttatgaatgaaaagtgcaagggaaaatgtgctatatattagccttgaacttggctttggttggctatgaagttatacatatatgtggatataaaagcgcaagaggaaaggaacccacagtaggattaattctcaaataagcaaacaaataagtaatgtaattagttgcttcaattcccaaaagaaaaatcaaatataacagttcagtacttagacatggacaataagaacaacacaataatgttacaagaagtttagcacttagaaaaactataagttgccctttatttattagtagcacactactgaaagtcacatagtggtaagggattttgatcttgggttgatgatataatgagttcacttatgagattgagggacacaaacaccaggctctttaaataagtgggataatctggaggccaaactctgttttgctgcagaggaaacgccattcttacctatatataaaatcttctttgaacacggataaaatcaacacgaactttggtatattcattaaagcaaaagctgagattcctgagcgggttgaggacatccatattgtatttggaaagacccaaaagaggtaaaaaggtaatagttactgatgagtcactatttacctttattttctcacctttctgtactcattttaatccctgatttgtgcttaatcgtttatattccgcactgtttctcatttaggatttaattggaccgataattcagattttaactaatttggattttttaagtttaattattccaaattttattttcagggcagtttaataattaaatgggcttggaattaattcatggacttgaagactggagtgccacgtcagcatcattttccacatcagcattttattttcgttttattttgctttagtgattttctgggccaatattgttaggaaaggcccattttcgttttaggtcaacactagtatattgagaatacggtgcccatgcagaacgacgaaagaattcacgctcagttctcttagggttttaggttttcgttttctgcttgttactctgcttagggtttgcgtttctatttggattttcgacttcagaatacgtttgcatttcaatttcagtgcttatttcgtttttgcttcaagtttcgtttcttgtttttccgcttccgtttgggtttcgtttctgttccagtttcgctgtaatgttcagctgctattcaattcgtgtttctgttgcaattttcgaattaatggaaggctaattcttagggttggaccctaggacaaattgcaaccctttaatggaggttctctgcgcttgaattctgttctgcttaattcttccttgttgggtctctgttctgcatttttcgaattagagtcatgcttaatgattctgagttgattgattcagtaatctcaggttgcttaatcctgagagattaggtctgatgaggttcgcgtttgcttaattcgtgtagggatgttttaggttaatcttcgcttagtagattaatctggactaacaaggattaagttaggatagattatctttcgtgaaccgaggatattagaggcgcaatctgttcaaaggtctgacttgtttaatcactgaaattatttggtatttctgctttattttatatactcatgcgttatgttaaaacaccccccattacacgtttaatcccttagcacagacaattgatccttgagaaacgacctaggagtcactttcctagtactgcatttagttgtattaatttgactgagtatgacctcgatcacttacatatgaaagaagggttgatattgtttaatcttccattctggtttgatctagatgttagacattgtatcgatgttatgcatgtggagaaaaatgtatatgacagtgtcactggcacgctccttaacattcaaggcaagacaaaggacggtttgaacactcgtcaagatcttgttgagatgggtatacgtgagcagttacatcctaggtctgatggtaagaaaatatacttgcctccagcatgtcacactttgtcaagaaaggagaatataattgtcagtgtctgagtcgagtgaaagtgccacagggatactcttcaaatattaagagctttgtgcaggtcaaggatcttaaactaattgggttaaagtctcatgatttccacgtcttaatgcaacaactattaactatggcgattcgagacattttgccacacaaagtgaggcatgctataactcgcctgtgctttttcttcaatgccatttgtagcaaagttgtggaccctgtaaagttagattacttggaataaaatgcagcaattatcttgtgtcagttggagatgtattttcctccttcattttttgacataatggttcacttacttgttcatctggtcagggaaattaaattatgtggtcccgtttatttacagtggatgtacccagtcgagcgatacatgaagatcttgaaagggtatactgtaaggacccttattcttggcgccagaccccgcgcgacagcgcggggattcacttaagaaaagcttattttaagtgtggcgcgggtcgcgccagagttggcgctgatcgcgccatatgttttggttgtggcgcgaggggcgccagtgtggcgctgatagtgccatactctcggcaagttcacgctaatagcgtggcgacgacgccaatggcgtggactggccgagaggttggcgcgggtagcgccaaggccgcgcggatcgcgccagaaagtgcctggagagccattttcatgcggcctgttcacgctaatagcgtgacttacggcgccaatagcgcgggaccaccgccattgtggcgctgatcgcgccatatctggcgctaatcgcgcgggatcgcgggcaggccgagtatatttaaggataaacgcgaaaagggagaggaaaaaaagggtattttcttcttccctcagcccaaacttccattagagaccctctgagctttcctagacctgtatatactagcctaaacaccttcttgagacctataatcttgttagaaccgattagaaagctgaaatccttcatctgttacttgaaaaccatttgtgagtgagaggttgagttctcaagtggaaaacctcagagaacttgagaataggcgagaactaaggcgggagacggacgtcagaacttgaggaagctgtcctgcggccttttgagtcgccactgaggtaagagactcaagtttctccggttaattttgaatttgagggtctctgtgaatagtgacccatatgatctggggctagaattagcccagggtcctgtagagaatattgttcagagttgagtagagatgaaggattagctttcagtttttgattctgatgactttggatttttggctatgtactgtctgtgtggcctgtgtaatggtcacttgtgcgtgtctgttcatataccagagccttagtctgagtcatattgagcctgagggactgatggaatgagactttgagtggaactcagtccattctgatgataattgagctaaggttgagaaaaactaggccagatggctatactctgagtctgggatgactccgatgacttgtatgcgacctgatgggccttgagtggtccgagagcagcctagtgtaggctgagcttgtttgaaccctaggataggagaattatgttatgttatgttctgtgcttaagcctgatggctaagtattgatctgtaattatgtatgctttgatcaggccttgagcttgatattgttggtggcaggagccacagacctgggaaggaactgcagtctgagaccttaccaggtaagttcagtgtatctggggaatgagttcccgctttggttgcacaccacactcctggggagtgttggtcatgattcatgatgcatgcattggctgtgacattgatgtattgagattatgtatctgcatttgatattgtgctgtgcttgagatatctgttggccaatagacagataccggcgttgaggagctccgccgtgtatttgggcgttgaggagctccgcctgtggcattgaggagctctgccacatcatgatattggccaatagatagataccggcgttgaggagctccgccgtgtattatgggtgttaaggagctccgcccagtggcattgaggagctctgccacatcatgacaggtactgacgttgaggagctccgtcagaggcattgaggagctctgccacctgtcatgtgctgagattgtgatattgctttgctatgatattgatttgttatgatgaggccagagggccaggccagtgggccttgtgtgatgtttatttgtttatgtattgtgaatctgtgggccagggtgggaatgatttcccaaggaccctgagcttactgagatatgttatctcaccccgtgtggggcttacatgatttcaggtaatgtttctagaagagaagatcagtctcagggcaggaggcccagttgagactaggctgcttaactgagaggcggcatggagagcttacaggctctattttgagttttattttgatatatggtcctgtataccctcatggagggctgatattcttttgtatcaccacgacatgtgtggtgtggactctgatgtatatgtctgtacagaacttttatgatatgtatgtgagacgttcccctgagcacatttgttgaatattgattatctgcctatatgtttaaattatctgtctatatgatgatggttatgaaaaactggatcagcaggggcgtggtatttcagttttaatgtgtgtgttgtctgatagatttattattccatacataatgtatcgagaaaaacgattctctgcttccgctaatttttttataatctatgttttatgcgctaatctgatattattaatgataacatgtcggaggcctacggggtgttacatatacaaagaatcttcaccgtcctgaagcatccatagttgaaaggtacattgcagaagaagctgtagaattttgttcaaagtaccttgaaaaggcaaaacctgttgggctttcttaggctcgacatgatgatagagtcgtaggtaagggttcacgagggctgcatattataacgcctactttacaggaattgcaacaaactcatttgtatgtcctgaataatagtaatgaagtcctgccatacatagctcgtcatgaagctttagtcaaggaaagtaatccaagaatgatgaagaataggttgttgaaagagcataacaagactttcctgaattggtttaaagatacaatatttagtgatgaatcttcctttgaaacaatgaggaagttagcagatgggcctaaaataaatgttagaagttggcagggaaacaatatcaacaagtactcattttacaccaaacaacaagatgacaagagcacaatgcaaaatagtggggttagccttagggttgaatcctagcacttcactactgtgcatgaccataatccccgtttggcgtgcatgctttactttagagtcattgatgacatgcttaattatgttaaattctctgtgtgtgttttcaagtgtaaatgggttgatatcaatagtagtgtgcgaaccgaggattcagaatttacttttgtagatcttaacaagctagcttatcaaaatgaacctttcatcatagcagagcaagctaaacaggtgttttatgttcaagatccttgtgatgaaaggtgatcagtggtactacatggaaaaatcattggtattaatcttgacaatgatgattcaacacttgatattggtgtcactcagttctcgacaaaaatgcctgacgtcaatagagaagatgaagttgacgacgttcatgcaaatcataatgatcatgatgaaggagaattatttaacatcgtttaatgtaatgtttattttatattaacttgttttgacttttacaatttcataagtaacctcacttttcacttaactttacttaattttgtttttaacagggtcatgactacactatcgagctcccctcctcgtcctgagtcagcacctcctagtcctaagtcagcacctcctagtcttgagtcagcacctccttgtctgtaacaccccgtaggcctccgacgtgttatcattaataatatcagattagcgcataaaacatcaataaaatagtttagcggaaacataggatcgttttcttgaaacattatgtatggaaacgcataaatatatgctattaacacacacatatacaaaacataaaccacgcccctgctgatccagtttatcaaaataacaaaataagacagataacagatctttaggcagagtaataacaaataaaacatacacatgtactcagggaaactatcatatacatatcatcaaagttctgtacagacatatacatcagagtccacaccacacatgccgtggtggtacaaaaaaatatcagccctccatgagggcatacagaaccatatatcaaaacaaaaacaaaatagagccttcaagctctccacgccgcttctccatcaagcagcctagtctcaactgggcctcctgccctgagactgatcttctcgtcctgatatattacctgaaatcatgtaagccccacatgggtgagataacatatctcagtaagctcagggtccttgggaaatcatccccaccctggcccacggattcacaacacacaaacaggtatatgcatcatacatggcccactggcctcatcatatctagtcaatatcataatctcaatcacatgacaggtggcagagctcctcaatgcctggcggagctcctcaacgccactgacggagctcctcaacgtcagacctgtcatggtgtggcagagctcctcaatgccactgggcggagctcctcaacgcccatgatacacggcggagctcctcaacgccggtatctatctattggccaacagatatctcaatcacaacacaaatgtcaaatgcagatgcataatctcaatacaaacaatgccaaagccaatgcatgcatcatgaatcatgaccaacaccccccaggagtgtggtgtgcaaccacagcgggaattcatccccagaaacactgaacttacctggtaaggtctcaatctgcggttccttcccaggtctgtggctcccgccaccaacagtctcagaatcaaagcctaatcaaggcacatgcaacctcatatcaaaataagcccttaggcatacaattcacagtgcacaacaaatcagaattcccctatcctagggttcaagccagcttagcctacactaggctgctctcagaccacacaaggtctctcaaggctaattacaagccatctgagtcatcacagacccaaaatacaacatatatataaggctctggtatctcagcagataacacaagtgaccattccacaggccacacagacagtgcagagccaaaatccaaagtcatcagaatcaaaaactgaaagctattccttcatctattcatcgttctaaacaaatttctcaacaggaccctgggctaattctagccccagctcatatgggtcactattcacagagacctccccattcaaaattaatcggagaaacttgagtctcttacctcagtggcgactcaaaaggcctcagaacagcttccacaggctccggtgtccttctcccaccttgggttcgagcctagctcaagttctctgagcctttctctctgaggttcctctcctcactcaaatctggggttttaagcaaaagatgaaggatactagcttttcaatcggttaaaacttaattaaaggttgctagaaggtgtttaggttagtatctgaggtccctgaaagcttgggaggtcatccatggaggtctggaggtccaaggaagaagaaaggttggttttcccctcttcttctcgttcttggcctttaaatactggttctgccgacgttcccacgcgactcgcgccatatatggcgctactcgcgccacgttccagtacaaaacagattttctggagcacttatggcgctacccgcgccaatctcacgctactcgcgcgggatgacagaatccaatggcgcgactcgcgccacctctggcgcgacccgcgcgagactccagagaagaattggtttttcagggcacttgtcgcgcgaaccgcgcggcccttggcgccatccgcgccagactctctggtcacccacgctccccgcgccaagaccacgccctcagcgccacatcttaacggtatggcgcgacccgcgctacacctggcgcgacccgcgccgcacttaaaatcaggttttctaacctgaatccccgcgctatcgcgcggggttagggcgccaactaaagttatgtacttagggttatcacattgtcccgagtcagcacctcgccgtctacaacaaagaagactaggaaagcaacaagtttgaggtcattggctaccagacttgtcggtgttgacagaccagtggttcatgtggatcctgccactggaaggctgatggtcctcaggcaaagaaattgaggacgtatcttgggatcgtggctcgagacaaggtggatgtcaccattggtaactggaaggaagttcttgcaacttagaaggagttgatttgggaagacatttaggtattacaattaaatgtcaatgttattgtttgtagtaatacaatttaaatgttattgtaactgttaaaattgttttttgtatcgtaggctgaatttgatatacctaaagcatccaaccaacggacgaagaagaaaattctctagatagtaggagagcgatggaggcagtttaagtcggatctaacctcaaaatgggctttgggacaaggcaaggatgacaatgccgacactctctgtgacaaatacggtattagtaaggacaagtggtgccaattctgtgagattcgtagagtcgtttcatgggaggttagctgatatgtatatgttttagaatttcacaattatggagtctttcaagtgcatttttttacatgttaaatccgtttatttacagggtgttagaaagaaggctcatgccatccagaagctgaatactgcacctcatgtgttgtctggcgggggttgtgatttgttagaacaaaaattgatggaggaaaaacaaaagaaacgcttggaggaagcagtccaaggtgagagcaccgagaccatcgttcatcctctgtcccctgttagacgacacgtgaagtggaagctggctcgcacaaaaaaaaagtgggacaatgacatctgagacagcacgtgagattgcagagaggattgtaagtcaaatgatggtttcatttgtcattagttaattttgcttaacaaattacaaaactaatgttctagttattttgactgcaggataccctggatgagcaatcgacacagggtagctttgtcgctagtggacgttaggatgtactcactgctgccattgaacgaccaaagaacccaggccttgtctgtgctactggagcaggtgtgacaataaaacaatacttcggaccgactttatcaacctctcgcaagtctaagtccatgaacgctgaggccttggattaacttaaacagaacatctgggaagagctcgagcaatcgatcactgagaaagtggctccacaactaatgatttcattcagccacatccagtcccagatgcagtctattatgcgtctcagggtatgatgccaccttcgacggttgaggttagtccttatagtgcccgtgtcagcaccaagggaagttgtgtcgatccctcagggaataacccagacacgactgcatctgacagatgtgggttgtatgttgatgacaatcctccccgcctgatcacccttgaaagagtttatgagggatcgacaaccgtgcacaacgtccctctagcagatgatcaggttaaggtgggtgttgaggaagtttgagatattgatgctcgcatccctgtaccaactgaagaggttcagtttgttaactgtgtaggatagtttgttaactgtgtaagataaataaggacctgagggactggcgaaacatgtacataagccagaacctattgtcgatcccctatactagatcgcattaaccatccccgatcttttcctcagacccatccaggtgtcgtgggaccctactttgttcggggtgtataatgacaacttcccattgtacaaaaaacatgaggatatttttgagataatttacggtggtcaatgtctgaacatcttcgttatacaactgtggattctgtaagtcactttcaattggctaccattacataactaattatttaatattcatgcatagttgactttattttcttaacaataggaatatgaatgacttatgtctgtagtcagatcatgccgatgtgtatggattcatcgagccacagtcaatacagagatctgggaaattgcaatttgaatctgaggactatatcaagaaatggatgcacagttcacagaaagatgtctacgttacagcgtactgaaatgggtaagtaaaaatgaatttaaataatgtatgcagtataataacttctttttctccaatgcagtgtacattggcaattgcttgttatatgtcttaaggacaatgttgtcgtgtggttctgttcattgcacaataagcctcataactacctgaaaggaattataaacaggtaggttgtaatttgtaagacatttctgttattatttctaacacatgcatatgttaattgtacaatatgcatgcatgtttctcttaagcagtgctttgaagggattccacaatgatcaggtcactaaatccaaggctactactaaatggattgcggttaaagtaagtcaatggtttatgtattgaaaataactttttttactatttacactaattttcgtttaagtttgactatgttattgaatttagtgtaataagcaaatgaaagcaccgagtgtggctattatgtcatgcattggatgtcaacgatagtccaagggggcttcagggataactgggacatgataattgtctaattcaaaactaattgtattttttttacttgtttttatttatacttattaaattatgttttattatgtcatgcagtattttactgatcaaagaccaccgaaagccaagagattgaaggctattagggttcagtgggctacattttatcttaaagttagatatgaaatattaggttaggtggttaagggatttttaaacaattgtataaatacttggttaggaaatcattttatgtacattgacactattgaatttactttttattcaaatattatataagtgtgttgtattttgaaattggctagatgtctactttttcatttgcacgatgaatttgggtaaaatagaaaaatagataaaatattaaaaaaatttaaaaaaacaacatcgatttttgttcaaaatcgatgttactttatattacaacatcggttttgacttaaaatcgatgttgttacatcacaacaacatcggatttcattcaaaatcgatgtccctatatatgtaacaacatcggttttgattgaaaaccaatgttgttacaatacaacaacataagttttcagtcaaaactgatgttgttacatatatagggacattggttttcattagacaaccgatgttgctatcatgtaacaacatcggttttatcttaaaatcattgttgttacatcacaacaacgtcagttttaattaaaaattgatgttgtaaaataagttaacatcggttttaaacaaaaatcaatattgaattattagattttacatttttttcttttatttcttatatagcgacatcagtttttacaaaaaatagatgttatataattttgttaacatcggtttttcaaaatcgatgttaacatccaaactttcaatgtctgtaatttcaacatcttaaaaaccgatgttgaatgtccaaaataaccaatgttcaatgttgtttttctagtagtgtataaacactaaaactaggtacaaccacatgtcactactacataatgggtcttctatgacgctgcttttacgacagttctataaaaaatgatgttgtaagttaagcggtggcatttttataaataactgcaacttttcaaaaacggttttatgaacaccgtatttgaaaacgtattacgacatcggttttggaagaaactgatgtagaattcgagaataaaatgtcgattttccaaaaccgtctttgatacacgtctctactaggttcatattcccaatctcctttttcattactaacctatcaatccccttcttctctctttctcggaaacgcaaaaccctaaaaatggctcaaaagaccgagaaaaatgaatttgccccaacttagagtcacggtgaagaacaacaagcaacaaatgctctctctttcttcctcttctttcagtttctcactgatccacgctccctctatttctattttctaagaagagaaagcaacccatcagatctccttgttttagctctcatgaatgttggtgcctaagaaaacaacccaaacccaaaacacaaaaaatgacatcatagaagatccccaaatgaagtgcaagaaacatgcctcagaccttagtagcaccgtcaatgtctgcgccttctgtctatggtctcatagtcctcgtcgccggctaggcccaggcccaattgacttgagtcagatcatgtgcctccaacgaatattccagaaactcagaccctagccctcactttttttctccctatgtatctcctcagaagtccgaatacaccgctgcctaccactacaacctccacgagaagctcttctatagcacaccggagctcaatcccaccttctacatcggtgattttgcctacgatggggtcgcgaagttgttcaagaaatgcttcaacaagttccacatatttgcgaagatcttcaggactagatcagagcagttccagtcagatcgaagaagatcttgagtggttaagtttttattccaatatattttaaaaaaaaatatgttctactctattttaagatttaaggtgaattttttgttccttgttctttagatgttattgaaaggtgtgaaacaccttttcctttccccttttaagtgcaagccgtgttccatttttcagttggttatttgttttagcccaaaacaatggtataccatgtaaaaagtattgtggcgtagtgctttcttgaataaagatgatggtaggttttgtgcatgaatcctcactgtggtgattacaagcaaagagtggaagcaaatggacttgattctgatgctccttggtgcaatatttcttcctaaggccttcaggtatgcaccttataaagacttttttgcggagttggttgaacaacttacaatattgatattttataacctcagttgcttctgaaacttatttatagatgttgatggctaacctgatagtgagattgtgtaatgtaagaaagtaagggcatatccttcacctgtaacaccccgtgtgcacccggtgtattatcattatgattatatcagattagcgcttaatcacttaattaaaactttgcagaagcataaacgaaaaccatatttcttgattacattatgtatggaacatacatcatcttatcacaaaacaacacaagcccctgctgatccagatcacataaacataatcataggcagatatacacaaatatctcaacagatataaacaggaggaaacaacattacataacataaactggttatgtacatatacatcatctgacactcgaagtgtctatacaaaagactaagcatccgagtgctttttgtaatgtctggtgttttaagcatgtaattaagcctatgattaaggataatcattatgcttaagtgttttcaagagaaaggcttgagaaagagatgaagtaggctgttctggcctgtggcgctagtagcgtgagtatggcgctagtagcgtgggactgttctggcctgtggcgctagtagcgtgggaagggctctagaaaaccatgttttcttctggagttccacgccagtagcgtggatgtccacgccaatagcgtgggttacccgagttcatggcgcgactagcgtgggagcggcgcgaccagcgcgggaccgacggatcagttttataaatagcccattttggggctgaaagagaaaaggaaaaagagaaaggaagagagaagagagagaaacctccattgatgagtttgagagcttcatatcttctccatctctcatataaacaccttagacccaactgagaaagtgttcagagcttcgagatcagctagtgacttagcttgattctcgagaaaagtcggtctacggcgagatcgggattccaaagggagcatttggaatcggagaatcaggaccagagaaggctttggctgagcgatctgtcttagggaaagtggttccctagtgtgtctgagctacacagaggtaagaaactcgagctctagccgttggttctgtatttgggtctttggttagattttgaatatcttgaggggcgtttttggaagtgttagagccgttattaggctcgggctctgtagagtcttatgctcagaggactgttctgaggaagttagagccttgaattatcattactgatgaagtttgattttggctctgagtctgcatgagcagagataaaaggttgactatttgactagtctggaccttagagcagttgacaaagttgctcatgagatgatatagatgagtttgaccggttgaaactggtgattatgagaagttgagcttgagctgtaatgctcagtgtggatggctggtgctgagtctgtggggactctgaggccatgtgtgttttggaatagaccactgagggtctatgaagaggcttgtagtgagatgagcctgaggaaccttaggcagaggacctaggttggtggagaggattgtaattcctttccctgaggcaggagtgactgcctgatgagcttattggctgatgatatgtttgtatggtctgtaatatgctgttgtgtgccttgtcagggcttgacactttgagtgtcagtgaagcagaccatcgatcaaggagcagagctgcgagatacggctaagaggtaagctcatcgttctggggattcgtccctttctcttgtttgccacccatgtgggtgatgaaatgcatgccatgcttgtgatgatatatgtttatgtatgtatgtgtaagcatgctagaatataatggccaatgtggcctatctgttagtgattgaaccgacaccgaggtggtgtcattgaaagtatgaaaccccaggttagacactgagagtgtgaggggaatatacacctgtgagataggtgtgagaggtattgggcttgaatggatgaacactgtgcggtgttcagtgttctgggtgagagtgcagatcagggaacgatctgtgatggaacctataagttatcgcgatggtatcgggctagctgaggttccctagccagaggaagagtgtgaggactcccgggaacggctggtattccctgggaggtgccactgctctccgtttaagtcctaaggaccgatgaccggtatggagattttccttaggcatttgagctgaaagacctgagtgatggtgctttcttttgtggaatgactcctcaggcatatgtgatagtggaaagccctgtggatggtgctccctgtgtggaatgacttcccaggtagtaaaaagccctgtggatggtgctccttttgtggaatgacttcccaggcagtggtaagacttgaggctggtgctccctttgtggattgactccccaggccgtgaaagtcctgagtaatggtgctcccgttgtggaatgactcctcaggccagtggttggaagtcctaagagactgagtgcctcctgtgtgagatgatctctcttaggcatttgagctaaagtcctgtggatggtgctccctttgaggaatgacttcccaggccgatgatggaaagtcctggatggtttcccaggccagttagtgacagataggtataagccaaatctggatatgtgaagtcctgagtgatagtcctcaggcattgtatgtttattatgagacgatgcgtctctggttgatacagtgtccagtgggtgacactgatgatagggtacctctaggagataggctttaagagccagcattagatgttgagaccagggatatggctttgaccctgagagatggctgtatgagccagtgagaggtgtatacctcggatgttgtgagcatctcatgttgtgaccccagatggctgggatgtaggggtgagccgggatgacctccttggttctattatgtgtatatcctgtatgtgttgggtgatgagtcagggtgcgggaggctttcccagaaccctgagtttactgagacgtttgtctcaccctgtttggggtttgtggttttcaggtgcttcttctggagcagagaagcgacctcagggcaggaggccctagttgagatgacaggctggaggaggctgcagttgaagttccgacaagagcttccagaggcgaagctggtctttgtatctctgtttagggatagggtgtgagtgtacaccccttgtactgtacatataacgatgtatgacccagctgtggtcttgttttgagcatgtatatgtacagatgatgatgttgtataagtatgtttcctcctgattatctctgtttagtttatgtttctgcctattattgttgtttatgtttatctggatcagcagggattatgttatgatgttggtgttgtgtgttattcccatgcataatgtaatcaagaaaaacgattacttgaacttaaagtagtaatcttactagacttaaagaatagttagattaaataataaagtgattaagtaacctaaagaataattaacttgaacttaaataggtggctgtccaaaatatttaattctacttggtggccataggattacttggctgcatttgaagtttaatgttgctgcatgttattttattttgttgttgtatattgctgtaattgtatttaatattgctgtatgatattatgtggctgtaggttgctgtatgttgctgtccattttattatgttgctgtatttaatgttgctttatgttattttagtatgttgctgtatatggttgtattggtaactgaatgatgccgtatgttgttgctgtatgttattttatggtgttgctgtatgctgtaattaatgtgctgttgtatactgtaacttaatgttgctgtaacttaatgtggctgtatgatattttattatgttgctgtatttaaggttgctgtatgatattaagctgctgtacgttgctgtatattgttatatttataatttaatgttgctgtatataattatgttactgtatcttgtggtattgtaacttaatgttgctgtatgctattttatcatgttgttatacttgtaacttaaggtcgctgtatgctattttactattattcacttgatgttgagctatgataaagttttatgttctattctattagaaattaagtcatggatatatgattaagagtcatgctgcatattattaagattaattctttaaaggaattatggcacacttgtatcctttatatggaattaatcatgatgaataattattgaatccatgtgttgctgagtgtttccatacaaaataatatgttgaatgaagttgtgccagatttacattgaatggttaatgagtatgaggaataaattgaagattaatgataaagaagaataattaaaccattcatgcattttcatgtgcatatgcctggcgggggttaatccgtggagttatgcctagcgggggctaaaccgtggagttttgttagatagctaaactgagtccacgcgttcaaaggtgttatgaacttgggggtagttgagacagggaggaccacaccaccatgatgatcacataggtggaggtgactatcctacgcgcccctgggctaccctgactggttggataagtttatttgttccaccggagtgggtgaggctatcttgactgtggccactgatgataaattattaagctgagatctcagtcatgcatcatttaaccaagaaatcatgcatcagccactacgaacattgatttatgattattttcttattattctatattttactattttgtgttgttataaacctgttgatttatctaaactgtgtttatcatgtacttacccctatttgtgtcggtggttgacacctgtgatgaccccaatttatttgggtgagcagaggaacagtaaactagagaaatcgttgaggaggacttgatgaagaagctggatgtactttttgttgtgattatgattttctgttatctgtatttggtgctacgctgtctgtattaagctgtttgtaacttattttgtgacgaactatttgggactgtacctggactgtttaataatttaatttgtattgaggtattatatttatataaaccatggtgagggaaagtcgcttatgttacaaacaacttacaaaattttcaagcaatgtgaaaagaattttcttgaaaaatttataactaagatcattataacacaaagtggtcacaaattccatataaaatcaatcaagcacgggagagtaaagagaggcgttacatgatgaattgaatcatttaagagaaatgaagtttgagaacttgttcctagaccttcttctctcaaacctattggcactaaatgaatttttagaaacaaacttgatgagagtggaatcataatcagaaacaaaactagattggttacaaaaggttacaaccaagaagaaggcattgactaaaaggaaacctatgcaccagttgcaagattggaagccattaggttattacttgcatatgcatgtttaatggattttaaactttttcaaatggatgttaaaagtgctttcttaaatggatatattgaggaggaaatttatgtggagcaacctcctggtttttttgattttaaatatccaaaccatgttttcaaacttaagaaagctctttatggattaaaacaagctctaaggtcttggtatgagagattaagtaaatttctgcttgaacaatctttcacaagaggacatgttgataaaaccttgttcatcaaaagacaaagaaatgatatcttattagtttaaatgtatgttgatgatataatttttggttcaactaatcaattgttgtgcaaggaattttctatctctatgcagaatgagtttgaaatgtcaatgatgggggagttaacattctttcttggacttcaagtgaagcaaatgaagaatgagacatttctaaatcagaccaagtattgccttgaagtgatcaaaaagcttgaaatggataaaagcaaagatgctacaaccccaatggcaactttaactaatcctgattcagatgaaaaaggaaagaaagttgatgagtcaagatttagaggaatgattggatccttgctgtatttgacagctagtagaccagatattatgttgagtgtgtgcttgtgtgcaagatatcaagcaaatcccaaagaatcacacctcactacagtcaaaaggatccttaaatatctcaattcaacaccaaaagttggtctttggtatcctaaaggtacatcacttcatttaagtaggatactctgattctaactttgtagggtgcaaattggatagaaaaagtactagtggaacttgtcacctactaggcagctcactaatatcctgacattgcaggaagcaatcttgtgttgttttatcaacaactgaagttgaatatatctctgctggaagttgttgtgctcaaaatctttggttaaggcaacaattgcaagattttggtgtagaattaaaagaaattcctctgctatgtgacaacacaagtgccatcaacatttccaagaatccaataatgaactcaaggaccaaacacattgagataagacatcacttccttagagatcacatccaaaaaggtaacatcaaaattgaattcattgatactcatcatcaattagctgatatattcactaaacctttggctagacatagattctatactcttagaaatatgctaggtatccttgatgaatctaacatttgctagcatgtttgccttgtgtttattcattggatatagctgttggatatagggggaggatcatgaagagtgaaagactttgattcaaggaatgtgtttttagctttcaacatgcttgaaatgccttcaagttttgtaatttattcaagtataagagaaaagcaatctgattgatccttgcattgcattcattcattattaagcttaaatggttttaattaatgtaaaatataggaacacttcacacttaaccaagaggggggttgaattggttaggtttggtaaattaaaaatttcttaaacaaaatcagagtttcctttaggatctttatcacttttgaaaccaagaatccttattcaatcaaatgctcagcccaaggtatccaatagctcaaaacttagttgataaacaaagtcacacaaccaagaaagacagaatataatcaagataaagataagaatcaatacacaaaagatttatactggttcacttcaaacactatgaagccacatccagttttcttccactcaacactagaatggagttccactattgcaattttctattcttacaagtaattacaaagtctccctttatcaactctagataaagtacagaaatctaaaactctattagattcttagaaacaaacccactgagaacaccacttagcacaactcctagagaaaccctatctctagtttacaagcaagaaacccaatcacaatagtcaaagaattacatccaaaatcaaaacaaaaattacagaaagattaaggagagaaacaacctgatgatccaatgattaacaatgcaaatgatggattaacacaggttgaatgaacaacttaaaccagcttcccttaatcttgaataaaatcttgctcaagattgactcataaactcatgatcaatgttgtagcagagcaagcatgtaaaaacactttgaaaacacttagaaaggctcttagaactgttttggctcaatgggtatcaatgttcaacgttactaaatgaagcaaagtgatttcctatttataacagaaaaacgtaacagaaataatcgattaacacgcgcctgataatcgattgttttgtttatgtaatcgattaatccaagaatgtaatcgattaaaatgttcataagcttttctggaatttctataacagagcaaataatcgattatttcgtattgtaatcgattaagacagaagatccatatttttcaaaatacactatgtaatcgattactggaaatggtaatcgattaaagcaggagccataacctttctaatttacacagcgtaatcaattactaatctaggtaatcgattatctagtacaaaacttagaatttaaacataacatgtaatcggttaccacctatggtaatcgattaaagtagggagtggctattttcagataagcctttgtaatcgattacagtatactggtaatcgattatcctaccatttcttaaaatacatatttaagcatgtaatcgattactactnnnnnnnnnnnnnnnnnnnnnnnnnnnnnnnnnnnnnnnnnnnnnnnnnnnnnnnnnnnnnnnnnnnnnnnnnnnnnnnnnnnnnnnnnnnnnnnnnnnnnnnnnnnnnnnnnnnnnnnnnnnnnnnnnnnnnnnnnnnnnnnnnnnnnnnnnnnnnnnnnnnnnnnnnnnnnnnnnnnnnnnnnnnnnnnnnnnnnnnnnnntaagttatttgtgagttagattgaatgcaatgctttaggatcatcagaattgcttttctcttacattttatcctaattaatctccaagttgtcctttgcatgtttgaaagctcaaaactttagtcttgaatgaatctttgcttatgcttcaagcagcttcctctgaattcaacaattaaaacatcaaaggttttatctttttggttaaggtttgaaattaattaaaaggtttttggaaaaatatttttcttactgttttaatcgattacttaataatataatcaattattnnnnnnnnnnnnnnnnnnnnnnnnnnnnnnnnnnnnnnnnnnnnnnnnnnnnnnnnnnnnnnnnnnnnnnnnnnnnnnnnnnnnnnnnnnnnnnnnnnnnnnnnnnnnnnnnnnnnnnnnnnnnnnnnnnnnnnnnnnnnnnnnnnnnnnnnnnnnnnnnnatttggcctttgattgaaaataaactgctttgttaaaggttttaatcgattacatagttaaaagattattttaagccttgttgtgataatcagttaccattatcagaaatcgattacatagttcattttgtaaatgactgttttctgatttaatcgattaccaaaattcgtaatcgattacacaattcattttgtgaaacatagctttctatcttaatcgattacagatcggttcaatcgattatttttcttgttgctgaaatccagaaatcttctttaacattttaatcgattaagtgatgatttaattgattacataagaattttaatccattatcaggcccgtttaatcgattacagttagttacaaattctgttataaataagattgaaggcttgacttgtttaacaacttgaccacttcgtatttctgagtatacacaagtcttttaagcatttctaagtgattttctcagtgtttttacttcttgcttcattcaaaatatcaatgggtctttgaatgattcttgagcgagattcttttcaaggttaaggaaaagcatgatctgatttagtttgctactcaacctgatttggtaattcatgtgcacaacattcattggatcatcaggttgtctctctccttaatctttgtgtgtaaatttggtattgaattcttgttgtaattggctattgtaatgcgggttcttcttgcttggttctagagaagggttctctagctcaagaatagagtagtgttctctagttcttgctccttagaattctattagggttttagatttatattctttatctagtgttgataaaggggatggttttgtaaaagcttgtaagaacagaaatttataatattagaactctaatctagtgttgattagaagaaactggatgtagcttctgttttgaagggaaccagtataaattgcttgtctctttgattatatttctctactattgttcattggtcattgattctttgattcatattcatcgtcaaacaagatctattttgagctattgaattcttgggctgagttatttgattgagtaaaaagattcttggttttgaaagtgataaagatcctgaactctgatttgaattaattttaaaagaccaaggttttaaccaattcacccccctcttagttattgtgagtattcctattattttcaattggcatcaagagctagttcttgagagttattcaagatcactatcttttcttcaaaaagaaaaatgaatacctcacaaattaccttcaaagaagatgcttctctcaatcgtcctccaatgtttaaaggggagcactttaatttttggaaaaatagaatgaaaatctttattaaatcaaatgacccaggtgcttggaatgctatagaaaagggtcttttattcctaagaaaattgttggcaatgaaatgattcctaaagaatgggatgagatgacacatgctgaataaaaggttgtccaatatgattttaaagctaaaaatatcattatctctgcactttcttctgatgaattttttagaacagtgagatgcacaagtgtaaaagaaatgtaggagatgttggaaataactcatgaaggaactgaagaagttagaagatcaagaaagcatgccttgatccatgagtatgagatgttcaagatgaacacaacagaaagcatttcttagctacaaacaagatttactcatatagtcaatcatcttctaggtcttgggaagatctttgatactgaagaactaaacatcaagatcttgaagtgtcttacaagaccttggcaaccaaaggtgacagcaatcaaggaatcaaaagatctatcaaagatgcccatggctgcactatttggtaagttacttgaatatgagcttgaaatgtctcaactaacttgtgctgaagatgcagaaaagaaaaataaaagtaatgcattaaaagctgcatcatcaaagtcagaaaaagtggaagattcaagtgaagaggatgaagaggacaacatgaacttggttgtcaagaagtccagcaagttcttgaggaaaaacaagaacaacaagtttacaaagaacaacaagatcaacatcaacaacaacaacaaaaggattgacaacaattttacttgctttgaatgtggaaaacctggctacatcaaatcagaatgttcaatctttttggaaaagcaacaaggtgaggaaggaaggaaaatccaaaagagcctacatagcttgggaacataatgagtcaacaacatcataatcttcaactgaaaatgaagaagcaaacatgtgtctcacctctacaatcaatgaagaagatgatgatctatcaattgatggagatgaggtaaattctgaacttgaacaagccattaatgttttccaagaaatgcatgaagaagcccaaaaccttgcaaaatcaaataacaagcttaaaggaaatcttagatggcatgttgcaaaaattactaaattgcaaactgaaatttgcaacttgaaagaagaaaatgcaaaacttgtttcaagttacaaaatgaatagatgtgtatgtgcttcttcttctactaatgttgacaaatataacttgctgcaaaaggattttgatgattacaaaagaagtcaaggagaaaaatacatgttactcctatccaagaacagtgacttaattgatcttttgagaaagctttacaaaggaaaatgcaacttggcttaaatgttaagtgtgcaaaagtatgctggagatacttctggtttgtggtacaaacaaggatcaaaatcttttggaaaaacagtatttgtgcctccaaaacagaagaatcaaaagaagttcaaaatctcaaagatcaatcaaaatgctttcttgagaaaatcatcaaaatctgtaacatgcaactattgtatggaaaaaggacatacttcttacaaatgctatgctaggagattctatgtgcctaatggagattgcatttgggttcaaaagaaaaagaaagttgctaacccttatggatccaatctcaattgggtaccttcctttataaattgatatgatttttgcaggtatgtctaagagctagatcctcattatggtaccttgatagtggatgctctagacatatgacgggtgacatgtccatgcttacaaatcaaactcttaaagatggaggatttgtcacttatggggataataacaaaggaaagatcattggagaaggcaacataggagatagattcaaaaccaaaatcataaatgttctttatgtggagtttgaagcataatctcctaagcataagccaactctgtgataaaggattcaaagtctcattcaatgagaattgctgcatgatttgtgatgggcaaagtggtgaagtgattcacataggcaaaaggaaaggtaacatttatttactttcaattgatcatgcattctttcacaacacttcatgtctaataagcaggattgatgaatcttggctgtggcatagaagggctagtcacattaacatgcatcatatgaacaagctaattaaaaaggatttagtaattggtttacccaaactcaagtttgaaaagaacaaactatgtgattcttgtcaaaaggggaaacaaaccaaaaattcttttcaaagcaaaaatattttttccacctctagaccccttgaattacttcacattgacttgtttggtccctctagaactatgagtttaggaggcaattattatgggcttgtcattgtagatgattactctagatttacttggactctgtttttgaaatccaaaagtgatgctttccatgcttttagaaaaaaggccaagcttgctcaaaatgaaaaaggtagcaaaattatctcaataagaagtgatcatggtggagaattccaaaatgaacattttgaaaaattctatgaagaaaatggaattaaccacaatttttcagcttcaagaacacctcaacaaaatggtgttgtggaaaggaaaaacagatctcttgaagaaggagctagaactcttcttaatgagacaaatttgccaaaatatttttgggctgatgctgtaagtacaatttgctacactttgaatagattacttataaggcctattttaaagaaaactccttatgagctatacaaaggtagaaaacctaacatttctcatttgagagcttttggctacaagtgttttgtattaaacaatgggaaataatcacttggaaaatttgatgctaaagctgatgaaacaattttccttggatattcattaaatagtaaagcatatcgagttttcaacaaaagaacaatgtgcatggaagaatctgtacatgtgatttgtgatgagtctaatcccttagttgatgaacattggatgcatgccatgcatgatgagttaaatcagttcaagagaaatgaagtttgggaacttgttcctagactatcctctctcaaacccattggcacaaaatggatttttagaaataaacttgatgagagtggaatcatagtcagaaataagctagattggttgcaaaatgttagaaccaagaagaaggcattgactatgaggaaacctatgctccagttgcaagattggaagccattaggttgttgcttgcatatgtatgtttaatggattttaaacattttcaaatggatgtcaaaagtgcctttttaaatggatacattgaggaggatatatatgttgatcaacttcctggtttcactgattttaaacatccaaactatgattttaatcttaaaaaggccctttatggtttaaagcaagctcttagatcttggtatgaaagactaagcaaatttctgcttgaataatctttcactagaggtcatgttgacaaaaccttgttcatcaagaggcataagagtgatatcttattggttcaagtatatgttgatgatataatttttggttcaactaaccatttgctgtgcaaggaattttctaaagctatgcaaaaagaatttgaaatgtcaatgatgggagaattaacattctttcttggacttcaagtgaagcaaatgaagaatggaacatttctcaatcaatccaagtattgaagtgatcaaaaagtttgaaatggagaaaagtaaagatgttgctactacaatggcaacatcaacctatcttgattcaaatgataatggaaagagggttgatgagtcaaaatttagagcaatgattggatcattattatatttgactgctagtagaccagacataatgctaagtatgtgcttgtatgcaagatatcaagcaaattccaaagagtctcacctaacaatagttaaaaggatcctcaaatatctcaaggctacaccaaaagttggtctttggtatcccaaaggtgcatcaattaatattattggttattctgattctgactttgcaagatgtaagttagatagaaaaagcactagtggaacatgtcatctacttggaagttcattgatctcatggcattgcaagaaacaatcttgtgttgctttgtcagctgctaaagctgaatatatctcagctggaagttgttgtgcacaaagactatggttgaagcaacaattacaagattttggagttgaattgaaagaaatacctttgctatgtgacaacacaagtgctatcaacatttcaaagaatccaataatgcactcaaggacaaaacatattgagataaggcaccattttctcagagatcatgtccaaagaggtaatatcaaaattgatttcattgacactcataatcaattggctgatatctttgctaaaccattggctagagatagattctatgctcttagaaacatgctaggaatcttggatgaatctaatctctgttagcttgaatgttgtatgccttttcatgtgaaatgctttgtaaattgaatccttcatcacaaaatcttaaaatttccaagttatgttgcataaattttgttttatctgatacttgttctgtaataatcgattaagtgtcgtattaatcgattaaaatcacttaaatcatgaattagaatgaattttgtgcttatgtaatcgattacataaacaatataattgattattcttattagacactcatcttcataaaattgaatgtttctgtaataatcgattaagtgttgaattaatcgattacactaatcaaaaattctttttcaaagtgaaaactcactagaataatcgattacagtaaatggtaatcgattaaatgattgagaatcagtttttcaaatttcaagacttactggaataatcgattacatgtcgaattaatcgattacacaagcttctatatgtttctgaaattcaaacttctctgtgataatcgattaaatcataaaataatcgattacactttgtcttctacctgtgaattttacagaaataatcgattacgttacgaattaatcgattactatatctgcagaaagtgattttgcttacgaattaattgattattcatggagttactgcaaaatctgacagattttcttagaagttgtaactgcccaactcccacctaattcaaatttgaatcctctgcaatgatttaatttgtactaactgctccttacttcaaaattaaaatacttggtgcctaaaaatatctataaatacagcctattatgaaggaagaaatcacacctaccttcattcttctctttcaatcttcattgtgcctttcttctgtttaagtatagtaaactctgcccaaaagatgtctgcctctaagagagttaagacctctaagagaaaggctagggaaacctctaacccagtggttagttggttagatcattggttccctccagaaagggacagaatgacatatctccaatttaatgccactaagttagtgtgtccccccaacacctagaattagactggttcattagggaaggcttccaattccctgcttttattgaaacctaggggttaagaaaatttgtggagatgaagggtatattctacccttaattggtcaaggtgttttacacatgtgccaaaggttccatggatgggattctaaggtcccaagtaaatggagttgccatggaaataactccataagtatgggaggcagtgcctggtatttcatttgagggtaagagaaagtttgaggaggaggctgaggggtacaatagagtagagacctataggggaatgttgattgatccccaaatgaggctaaatcttaggcttagcaaaccatgcccaggccattgatgatgacctacaactagtgtatggtctcaagaattcaattcagatgaattggattctcattcttgaggagattatgttgaagtccaagaggcttatgaactatccctttccctattttgtactcatctctagattcatagattacttcaacatctcaagcaacagtcttatcaaggagaagcatctaaccaaactagggattgtgaaaacacctcaaggatagcaaatggctagccaacaagctgctcctgctgctgctgccgggattgaagaggatgatgaagaagatgctgaagaaggaggccccactcaacctgcttatagtccatttgaatccttaatgattcaaaagatggatggtctgctgtctcgtcatcatgaacatagggctgagaccaatgcagccttagaggaaattaagtctaggctagagagtattgaagcaactgtgatgtttgataactctaaaactttctagtttataagccttgtatttcttcttttatcttttatcttttatcctttatattttatcttttatctttgtttttctatttttttaagcaatgtattggttccctcctgattaattatttctatttctcctacttgttatccgttgtgctatttaatttttgactttgataagccaaataaggggagaaatggttgattgattgtgtaattgagtgtgctctgcattgcactctgttctaccctatttttctgcacattttttgtacaaatcaaaaactgaatggattgttaaattaagggggagctaagtaatcaaatgatcaaattaagtcacataatcaagttaatgaatgatgaataaagcaagcagatattttaacacttgttcttggcaaagagtctgtgattattttcaggtttgaaaaagcttaagtcttctatttgattccctcaaagaacttcaagtccaacaaattatcaatcaagaatttggcatgttcaaagccaaaaagggggagattgttggatatagggggagcatcatgaagagtgaaagactttgattcaatgaatgtgttttgagctttcaacatgcttgaagtgccttgaagttttgtaattgattcaggtgtaagagaaaggaaatctgattgatccttacattgcattcattcattcattattaagcttaaatggttttcattaacacatcaaaggttatatctttttggttaaggtttgaaattgattgaaaggtttttggaaaaatgtttttcttactgttttaatcgattactgataagtgccatatttcagttaaaatcatgttttaaatgctggcacttatcttttgattccatccaaatttggttagaaacttgcctaaacctatttaaaatatgtttagtacttaaataaatgctgtttcagaagattaaaccaattatgttttgtattttgatagattccgtggatttccgaggcttctgaataatcaaagcaagcaaggagggcttacatagcaagcaggggaggtgttacaagcaaaccaggcccaaaatccatcaaggcccaaagctttcttcagcactaaggttttaactcgcccaggcgaccaaaccatgtgtatttggctcacccaggtgagctgcaagttccaatgagatgtgtttagctcgcccaggcgaccaaaacatgaagaaaatggtggcctgggcgagtaaagctggtaggtgatggatacctataaatagcccacgaatttgaagaggaaaggcattcttttggcttcatttcttcattcatttcttcctttgcttgttccttaggcttaggaggttaagtattagtattaagtacgttaagaaagtgagagaagtgaggattagtgtggagactctgccggagagaagcgataatgggaacattcatcaactctttccttgaggaggttctctccactatgagtagctagcttctctgaggattggatgtaatcttcttaaccctatatctcttttaatatttatgcatgaatcgttctatttcttgttggtaatttcattctacgcataatgcttgattctacttgatcactagtttcatgaacttaaaacctaagtgagactggaaagtaatcttagggtttgaaccgaatgattttactcgttacgttatgttgctaggaatagggcatactgttttgattgcataaaacacgcgattatagttcttaatgctggggtatttacttcatacgcgagagatcgattcaaggtaaaatagagtgcatcaataagaatagacgttgatttatgcttggtaatattaaatgaatataaaaggataagaatgatgaaatccaatctcactttctcatagatatatttcatttactaaaatttagtaattttacattacttgcaccactaaatgaaattccgctcaacctacttgtacataactattgaactgtttaattctatttggtttaactgagtaagctcaagtccctgtggagacaatcttataaattttgaaacttacaacgataaatcggtgcgcttgccgaaaattattaacaattacttaataatataatcgattattttgttcttcgttcaatctggaataaccttcgtgaacaaattaatcgattacctatcggattaattgattatttggcctttgattgaaaataaactgctttgtaaaacgttttaatcgattacatatttaaaagattattttaagccttgctgtgataatcggttaccattatcattaatcgattacatagttcattttgtaaatgactattttctgatttaatcgattaccaaaatttgtaatcgattacacagttcattttgtgaaacatagctttctgtcttaatcgattacagatcggttcaatcgattattttgcttgttgctgaaacccagaaatcttctttaacattttaatcgattaagtgataatttaatcgattacataagaattttaattcattatcaggcgcgtttaatcgattacagttagtcacaaattctgttataaataagactgaaggcttgacttgtttaacaacttgaccacttcgtatttctgagtatacacaagccttctaagcatttctaagtgattttctcagggattttacttcttgcttcattcaaaacatcaatgggtctttgaatgattcttgagcaagattcttttcaaggttaaggaaaagcatgatctgatttagtttgctactcaacctgatttggtaattcatgtgcataacattcattggatgatcaggttgtctatctccttaatctttgtgtgtaaatttggtattgaattattgttgtaattggctattgtaaagtgggttcttcttgcttggttctagagaagggttctctagctcaagaatagagtagtgttctctagttcttgctccttagaattctcatagggttttagatttctattctttatctagtgttgataaaggggagggttttgtaaaagcttgtaagaatagaaatttataataatggaactctaatctagtgttgattagaagaaactggatgtagcttctgttatgaagtgaaccagtataaattgcttgtgtctttgactatatttctctattactcatattgttcattggtcattgattctttgattcatattcatcgtcaaacaagttatgttttgagctattgatttcttggggctgagttatttgattgagtaaaaagatttcttggttttgaaagtgataaagatcctgaactctgatttgaattaattttaaaataccaaggttttaacaaattcaccccccctcttggttattgttagtattcctattattttcaatagctttatacttgttcaatcatcacatgtgctttcaaaattcaaaatatgctgcataaatactattgaatctgatattgccactggaataatcgattaaggctcgtattaatcaattaaatgagcttgaaacatggcttagaatgaattttgtacttatgtaatcgattacataaccaggataatcgattattcttcatatgaaatacttccaaaaaatgaatttctctggaataatcaattaagccatcgaattaatcgattacatagcttaaaaattctttttcaaaaattcaattcactggaatactcgattaaagtgaatggtaatcgattaaattgtttgaaaaattgtttgaaattcaaattctctctgtaataatcgattacataggagaaataatcgattacacttcatcttcttcatttgaatttcactaaaataatcgattacttgacgaattaatcgattaaagcttctgcagaaactgattttgcttacgaattaatcaattattcatggagttactgtagaatctgtaggattttcttggaaattgtaactgccaactgccacctaattcaaatttgaaacttctgtgtttaatgttagtggattaattcaaaaataactgttagtcatttcaaatttgaactttggagcccaaaaatcttctataaatgcagcctatattcaaaggaaaaatcacaccatcttaagcactattgtgtttttcttcttcctttgagcccaaaaaccttgtcctgtagcctttcctcccttgttaaatatgtctgcccctaagagaaccaaatcctctaagagaaagagtgttgaaacctctaaccctgctgtcaataggttagatcattggtttcctgctaagagagacaaaatgacataccttcagttcaatgccaccaaacttatttgtcctcccaaacaccttgaccttgactggttcattagagaaggttttcaattccctgacttgattgagacccagggattgagaaagtttgttgagatgaagggtaccttttaccctgaattagtgaaggtgttctacacctgtgctaaggcctctatggatggaacacttctgccccaagttaatggagtagccatagaaattactcctgaggtctgggaagctgttgttggtatttcctttgaaggagaaaggaaatttgaagaagaggttgggggttataatagggtggaaacctatagggggatgcttcttgatccccaaatgaggctgaagcttaggctaagcactggccaatgacccacgaggacagacttctccactgcataatcacctatatcttgaccccaagatccacaaaccatgcccaagccactgatgatgacatacaaattgtgtatggcatgaagaattccattcaaatgaattggattcttattcttgaggagataatgcttaaatccaagaggttgatgaattaccgcccatttgaagatgaagaccctactcaaccatcttacagcccatttgaatctcttatgattcaaaagatggatgccttattgtccctacatcatgagcacagggatgagactaattcatctatggatgagatgaaatctaggctagagaacatagaagataggcttgtccttgatgattttgataaactagcttaggtttcttgtatttcctcttcttgctttactctgtttttcttttgttttctttttctgattaatgtactgttcctccccttttaattaatgaagtttttattttctccttctcattatttgttgtgctatctttttgtctttgataagccaaataaggagtgaaatattgattgatatctaaaaagcaagcatactctgttttgctctctgttgtgctctgttttctactgtgtttttcacaaattaaaaactaatgaatttatctaagtaagggggagcaaactaagtctaaggaagcaactaatgaaagttaatgattgatgtttatgcaagcataactcttaacacttgttcttggcaaaaaggatgatttgttttcaggttaacaaagttcaagacttctattctcatcccacaaagtacttcaaaaatcaaacacatggtcaatcaaatatttggcatgttcaaaaccaaaacgggggagattgttggatatagggggagcaacaagaagaatgaagcctatgacttagaagaatgttttgagcttttcatatgccttgaagattgtaattcaaatgaagtgtaggagaaggcaatcttttgatccttgaattgcatacacataatcattaacatgcttaaatgtttccattaaaatatcaaagctactcactatttgaaaaaggatttaattgagtaatatttttggaaaaatataatttcactgttttaatcgattactgatacaatcctaaaaccaaggcaagtgaaggaagacttggaattacacatggaagcacttcctttggtgattaaagggccaatgacaagggctagggctcaaatactccaagatcatatacaatccaacctcaatctcttggagaaccatggagaaggctacaaaatgctaaatttatctgttgtaatcgattacaagtagctgtaatcgattaaaagctttgtatagatgttagaattgtcaatagctttgttgtaatcgattatttcgtattgtaatcgattacatggaagtgtgagattatgtgagttcctgtgataatcgattattctggcttgtaatcgattacctggttttgggagctcctgtgataatcgattatttagtgagataatcgattattttgttcatgagtcagtttccaggctgatatgagcaaagtaatcgattaccaagagttagtaatcgattatttgttccaaaataatcgattaccattcgaaataatcgattattactgttttctctgcagaggcgcgatttttagtttttgaaacagctctttagatagctttccttggaagctgcatttgtatttcatttaggacacatttacatttcattagcttacaatttcgtggtctatataagctacatttcaacagattgtaaggacttttgatggaatgaaattagaatgcactttgtgtgtgagaggttaagagttattctcccttgttcttagtgaagaacttcttgtttcttatcaatagcttctgagctattatggtgattcttgcaagacttattggaattcctattccatggtgtcaatccaaatccacttctaatcttcttccaatgtttcatttcttaaatcacaaaaacctaaaagctgtcctaaaatagagcatttcatactctgttttcctatccattgaagaattgattccattgcaaggaagatcagggcaaacaagacctgaatcagttcagaagtctatcatttggaattcttcttcaatttcagtcttgggattcttcaaaggtaaaattctgcgttagagtcaaaaacgaaaatccttagtaattccttgtttcttgatgttttcttgtgattcttagtgttgtagtgtaacaccccgtgtgcacccggtgcgttatcatcaacaatatcaatatcacgctatcagcgttatctaatcgcggtgcggaagcgaaagaatcgtttcccttgatttcattatgcatggaatataaaaacaaaccatataatatcatacataagcccccattgatctagttaaacagaaacatacaaacataggcagatacaaacatagaaatctaaccagagttatcaggaggaaacataaactcaaatataataacatatcatctgtacatatacatgctcaaaaacaagaccacatctggtcatacctcataattatgtacagaacaacgggtgtacactcacaccctattcctatacagaatactagacagagatcaaaagaaagagactcttctagtcttcatctgcaacccatgaccgctccagcactctcagctagggcctcctgccctgtggttgctcctctcctctagaagcacctgaaaaccacaaaccccacacagggtgagacaaacgtcttagtaagctcagggttctgggaaatcttcccttaccctggttcacctccaagcacaaacacataaaacagataacagagctaaggatatcgtcctagctcacacatacaatgtctaggacatcgtcctagctttcacccatcccagccatctgggtacaaacactggatgccatcagcatcagaggtctcccacctcatactggctctcaagccatctcaaaactcgtctccacagaggtacactaccatagtgtccaccccaggacacatcttatattagagaggcaccgcctcatcactgaaccagcattgcctgagttacctactcaggacttcacacacacattgcctgaggattctctcaactcaggacttcaagcacattgcctgaggaacctctcaactcaggacttcaagaatccagatatggctcatctaagaggccttaggctctcatcccctcgggaagccctctcttagagatacaacatatttgtctattgccgggcctctccaggacttccatgacacatgcctgggcaagaacatccataaatgggcaatcacctccaggactttccacaacacatgcctgagagagatcatctcacacaggaggcactcaatctctcaggactttccagtccaatgcctgagagggatcatctcacaccggaggcacttaacccctcagggcttcacatctcatgcctgagagagatcatctcacaacggaggcactcatccctcaggactttcccctgcctgggagagatcatctcacacaggaggcactcaatcccccaggacttccagacacggtctgagagagatcatctcacaccggaggcactcaatccctcagagcttcacatctcatgcctgagagagatcatctcacaacggaggcactcatccctcaggactttcccctgcctgggagagatcatctcacacaggaggcactcaatcccccagggcttccagacacggtctgagaaagatcatctcacaccggaggcactcaatccttcagactgtcaatccactacctgagagagatcatctcacaacggaggcactcaatctctcaggaactccacaacactggcctgggaaaaccctccaggactttcacatacattggcctgggaaaaccatccaggacttaatcacatacctgagataaccactcaggattctcaatatctctgcctaaggaggaacctccatatagggcaatccacccttaggactttaatggagagcaatggcacctcccaaggaatctcagctattccagggagtcctcaaactcttcctctggctagggaacctcagctagcccgataccagttcggtatcctataggttccatcacagaccacctcatggtctgcatctcatcagaatcactaaacaactcacactgtctcggtgtctgacctagggttcatcatataatcatatttctagaacggcctgagctccactccaaggaccgttatcagcccttcaggcttccagcacatatatatatatatatatatatatatatatatatatatatatcaaacatatcatgcattcatcaccccttacttgggtggcaaacaagagaaagggaataatccccagagcgatgagcttacctgatagatgtgccggcaactccaacctctagaatgatggtctgctcctctgacacctcgtgtcaagccctatccaggcacacaaccacatatcacagaccattcaggcacataaacaatcattcgctcatcagacagtcctcaactgcctctgagaaaggaacctcagtcctttctatcaacccaggtcatctacctaaggttcatcaggcttatcctctacaagcctttccatagaccctcagtggtctattccaaaacacacatggcctcagagtccccacagactcagcaccagccatccacactaagcattacagctcaagctcaacttttcataatcaccagtttcaaccggtcaaactcatctatatcatctcatgagcaactttgtcaactgctctaaggtccagactagtcaaatagtcaaccttttatctctgctcattgatgtgttgcaaacacatcttgtttttagtctagttttaggttagaatttgattaattacttaggtaaatagcttagaattagttgagtttagtattttattgtttaaatctaatttcaataccaattatgcattttcaggacaaaagaggagaataaaggccaaagaaagaagaaaacaaattttggagtatcacgcgagtcgcgccactatcacgcgagtcacttggaagaccagagaagatcacgtgggtagcgccgttactcaagtgggtcgcgtgggaacttcaagatttaagcatttcaacgctgctattccacgcgacatacttggagtgtcacgcgggtcgcgtgaagactcaaagaaataaggaattctcatctgttactccacgcgaggcacttcacaacccacgcgacacgcgtcattcatttctgccagtccacgcgactcgcgtggtatcgtgcgcgagtcacgtggaatcgttttagtttccttatttaaattatatttttttcagatttggtattatattaggattagttgccttaattaagtgattccataaatatatctagtttccttaattaagaagatttgatttagatttggaacagaaaataggccttgttaccttaattagatctatctataaataaaggcctctggggggggttcaacatatacagacacacacactacacctctctactctttctttcttttctctaagcctttggtttcttgaagcttatggctagctgagcttgtattgtgggaaggccatgaactgatgtaactcctctgtaacttgaattggtattggttttaatgctgttttgattattttattctactctgtgctattcaatgttttattcttatttggaattggccattctatttaagtattgagggttaggattcgcaatggacacgttggggttctaatttctgacatgtttagaataatagttgttcttcacctaggaatagggatgcgtggctacggactttataatatgttctttgtatgcttaatttgatagatttcaccaagacattgggttttcgattcaggttaaagggttgattcactaagacattagggattaactaacttaggaaagacttattttccgaataatcttaacaagatcgcatgagatatattctttgaatacttagtttgacagattcactaagggtttaggtttctcgatcgaactaaagggtgaaatcgctggttaatgctcttaagagtctaggatttacgaatttaggaaagatttatcacgtgtgtgacctaagataataaaccaatcaagtgaaggaggtaggaacaaaagggattgggcctgaccacaattgtttcttccattggtaatttctttacatttttattgcatttattttatgtttttattcaatcaacaaaccactcaacaactatttctttgttcttatttttctgtttttaattccaatcatttagaattaatattattgtaaaaatcacccaatccctgtggagacgataactctacttacctacttttattacttgttaacgatcggtgcacttgccgtatcaaaattgcgcgttagcgcacaacaagtttttggcgccgttgccggggattggttaacggatttttacagtaatttttaatttttgtgattggaatttttgttactaatagcttctccaagttttatgcgaggtttagtcaattctgaagatttgcaattcgatccggaaatagagcgaacaatccgaagaagactagccattcaaagaagaagaagaggagctgaaggtttcgactttgattcaattcctgaattagagtcagagatagagatggctgaccacgaaacaaataatcagccaagacggaggcccgaagatgaacttatggaggatattctggctcctatgttcacaaggcctaactccagtattgtgaggccaccaattcaagctaatcattttgatattaacccttcattaattgttttggtggaacgcagtcaatttggaggagaagattcggaagacccacatgactttattgacagatttcttagaatctgtaataccattagacatcaaggagtctccgacgatgcggtaagattgagtttatttccctttgctgtcaagggaaatgcattgagatggttaaactgtcaaacaccaaatagcatctcaacatgggaagatctggttacaaggttcttcgctgaatatttttccatggaaaaataccaccgcttggtgaatgaaatcaccaacttcacacaaaacggaagagagtccttatgcgctgcatggaatagatttcaagagttgataaggagatgtccacagtatgatatgcctgtaggtaagcaggtaaggatattctttaatggtataactcctgaaactcgaatgattgttaatgttgcagcgggaggcacaattagatcaaagacagcagctcaaacttatgagctaattaaatctttggcttgcactgagaacgtaagtagcaccattcagccaaagagagaaccaatacaattgggcaacagtgatgccatgcttgcagaacagaaaattttagctcaacagttggctaaattaaatgaaaagatagatagaatgcaagtctctgcagcccaagtttcagccaataaaccacaagtcagttgtgaatactgccaaggtgagcattattctaatgtttgacctattcttgttggagctgaccctgtgcaggttaatggcatttggaatgatcaaagacagcagcagccacagcagaaaaactacaattatactgctggaaacaattatcaaaggaatctgcaaggaggaggattagactacaagtctaataattatctacagccccctcctattcccaccaccagcatttctgaacttgagaaagtagtaatgcagctggcacaaacaacatctgaattcatccaagagactagagcacaccacagaaaccaagatgcctccatcaggaatcttgaaattcaaattggtcaattggcaaagcaaatttcagaaaggccacaaggacaattcccaagtgccacagagacaaatccaagggaacatgtcaatgctgtcaccactaggagaggaaaagtgctaactgaacccataaagcatgaggcaagcaacaaggaacttgaaaaatctgcagcagctgatacaaatgaagaaaaagctgcagaaaattctggggaacaaaattctgcacatcaaccaaagaagcaatgggacttctctcgcttcgagaaaccaccatatccggtgccaaccaagcagcaaatccaacaacagcagtttgccaggttcttagacatgtttaaaaagttacaggtacacattccatttgctgaggcattagccaatatgcctcaatattcaaaattcatgaaacaaatcttgtctaagaaacaaaagctaataaaaggtggaaccataaaactcaccgaggagtgtagtgccatcattttaagaaaacttccaaagaaattgaaagaccctggaagttttaatattcctgtgtcaataggaaatataaatataggaaaggcactttgtgacttaggggctagtataaacttaatgccattatccatgtgtaagtccctaggtataactgaattaaaatcaactggagtttccttgcaattagcggatagatcattaaggaaaccatcaggaataattgaggatgtattagtaaaagtagacaaattcatctttcctgcagattttgtggttttagatatggagggtgaaagtgaaatccctctaattttaggaagatcatttttagcaacttctagggccttgattgatgtagaacaaggtaaattagaattgaggatggaagatgaatctgtggtttttaatgtttttaatcctgtgactaatccatctaatagttatacttgctctaggcttgatttgttggataacatgaattgttcaagtctaacagcagtaggtgaagaaactgcagtagaaaatactgcagaagaaaactcagcacatgtagaaattgttgcagaaaatttgacagcagcacatacaccagcagcatccgatacaacaagtaataatgcagcagaaaaatctgcagaagaaaattttgcaaaagcggaagctgtagcagtagcaattgctgaaaaattgaacattacaagtcaaccaaacactgcagaaactcttgaacctgggctggaaaacaaaactgaattttcagacggagcaccaaaggtaaaactgaaaaaggttgcagcaaaagctatggaaagagctaaaaagaaaagtgtcaaaaagttggaggcacagaaaatcaagaagtggcgtaacaagagaattgagccaggacaaaaggtaatgctagcaacatatcacatgatatttccaggtaagaaagcattttgttggtctggccccttcataattcaaaagatttgctcatttggattcatagaaattattcctgtagacagaggcaaaccttttaaagttgctaaatgtcgactgaaaccttacattgaaaaccaagtggatagtgctaaaactcataatccacttaattccactaataattaaaaagcatgatgcgtctagctaagacgttaaacaagctttggtcatgtacataactgttgcttaagttttgaagttattagcctaatctttgttttattttacatatgcatgtatccatataatcattatactttcttaagtattttaaattcagttgatagcagtaaatttaaatttctgcaaattgttcatgcaattgtaagtttatgcatcctaaccatctttaagtttatttcaattttgcttaaataaatattaggtattagttagttaactcaatataggagtagacaagtaatttgagttattaggatagagaattagaagcaacttaataaaggaatcagaaaaggcaagtcacgcgactcgcgtgagaatccacgcatatcgcgccatacatactggccaaccacgcgactcgcgtgggaactaagtgactcgcgccatgaggcattgctcaaaagcaccatttcacgcgactcacttggtaaatgacgcaattcgcgtcacacatagaaaatcaacagacatccagggtaatccacgcaacctgcgaggaatatcaagtgactcgcgtgaaggtccagaaacaaaaagccagatatcacgcgagtcgcgtggaaagtcacgcgactcacttgaatcagtactggaggatggcgtggtacacttcataagtggcgcgtgtcgcgtgagtacgtggaaacagtttttaaatagaatcccaaaaaccgcgcccttaatcccattctccccaaatcatttccctcaacttcctcaacctccctgaacctcctctcaatcataactccctctcaataccccctcacactttaaaaaccccacattatcttctctcccgtgcatctcagcattcttcagcatcataaatctctgcaattcaccttcattcatatacttcacttgaacaaggacaaggtacgcctaaactctggaacaccttagggttaaccacattttcaaattgcatataaataattgttcacatctatcttcttgtctgtggtctgaacggattgaaaaaaattttgggttctaacagactccaaatacacacattgtgttgatttgttttcatgcacattacctgtttgatgaaatgcctagatgaaaaatttagcttgaaatgatgccaaagttggttcaatgtgcataaagctttaatgaattagtatgacatgatgagaatgactatggtaagcaggaatcgagtaatagtgaaatattattaaggcatgaattgctaatgttttaaatcaaatgccttaaacatgctaaaagcctaaatctgggaatggggaaattcatcttttatatgtgtttaagttgttggataaatttgggataggcttgcatgaaataattgaattctgaaatttttgatacatgcaagaacttaaatnnnnnnnnnnnnnnnnnnnnnnnnnnnnnnnnnnnnnnnnnnnnnnnnnnnnnnnnnnnnnnnnnnnnnnnnnnnnnnnnnnnnnnnnnnnnnnnnnnnnnnnnnnnnnnnnnnnnnnnnnnnnnnnnnnnnnnnnnnnnnnnnnnnnnnnnnnnnnnnnnnnnnnnnnnnnnnnnnnnnnnnnnnnnnnnnnnnnnnnnnnnnnnnnnnnnnnnnnnnnnnnnnnnnnnnnnnnnnnnnnnnnnnnnnnnnnnnnnnnnnnnnnnnnnnnnnnnnnnnnnnnnnnnnnnnnnnnnnnnnnnnnnnnnnnnnnnnnnnnnnnnnnnnnnnnnnnnnnnnnnnnnnnnnnnnnnnnnnnnnnnnnnnnnnnnnnnnnnnnnnnnnnnnnnnnnnnnnnnnnnnnnnnnnnnnnnnnnnnnnnnnnnnnnnnnnnnnnnnnnnnnnnnnnnnnnnnnnnnnnnnnnnnnnnnnnnnnnnnnnnnnnnnnnnnnnnnnnnnnnnnnnnnnnnnnnnnnnnnnnnnnnnnnnnnnnnnnnnnnnnnnnnnnnnnnnnnnnnnnnnnnnnnnnnnnnnnnnnnnnnnnnnnnnnnnnnnnnnnnnnnnnnnnnnnnnnnnnnnnnnnnnnnnnnnnnnnnnnnnnnnnnnnnnnnnnnnnnnnnnnnnnnnnnnnnnnnnnnnnnnnnnnnnnnnnnnnnnnnnnnnnnnnnnnnnnnnnnnnnnnnnnnnnnnnnnnnnnnnnnnnnnnnnnnnnnnnnnnnnnnnnnnnnnnnnnnnnnnnnnnnnnnnnnnnnnnnnnnnnnnnnnnnnnnnnnnnnnnnnnnnnnnnnnnnnnnnnnnnnnnnnnnnnnnnnnnnnnnnnnnnnnnnnnnnnnnnnnnnnnnnnnnnnnnnnnnnnnnnnnnnnnnnnnnnnnnnnnnnnnnnnnnnnnnnnnnnnnnnnnnnnnnnnnnnnnnnnnnnnnnnnnnnnnnnnnnnnnnnnnnnnnnnnnnnnnnnnnnnnnnnnnnnnnnnnnnnnnnnnnnnnnnnnnnnnnnnnnnnnnnnnnnnnnnnnnnnnnnnnnnnnnnnnnnnnnnnnnnnnnnnnnnnnnnnnnnnnnnnnnnnnnnnnnnnnnnnnnnnnnnnnnnnnnnnnnnnnnnnnnnnnnnnnnnnnnnnnnnnnnnnnnnnnnnnnnnnnnnnnnnnnnnnnnnnnnnnnnnnnnnnnnnnnnnnnnnnnnnnnnnnnnnnnnnnnnnnnnnnnnnnnnnnnnnnnnnnnnnnnnnnnnnnnnnnnnnnnnnnnnnnnnnnnnnnnnnnnnnnnnnnnnnnnnnnnnnnnnnnnnnnnnnnnnnnnnnnnnnnnnnnnnnnnnnnnnnnnnnnnnnnnnnnnnnnnnnnnnnnnnnnnnnnnnnnnnnnnnnnnnnnnnnnnnnnnnnnnnnnnnnnnnnnnnnnnnnnnnnnnnnnnnnnnnnnnnnnnnnnnnnnnnnnnnnnnnnnnnnnnnnnnnnnnnnnnnnnnnnnnnnnnnnnnnnnnnnnnnnnnnnnnnnnnnnnnnnnnnnnnnnaaaaaaaaaaaaaaagtttattgtttgttttgttttagtgattataaatgttgaataaagtactagattttaaagaagatgaacaaggaagatgaaagaccacaggattggacttaaaggactggatctagcctcatattagctactatccaaagattttcctacctttagcccagccaagttacaagcctaaaagaccttctgatctaattatgcttgcatctgttgagaatattttcaagcctatggtagtgctttgattatgtttgagtgagagattgattaacctaatacacgtgagtgcatgagtgcatacacacatttctgtgagaaatactcaagtcatctcattcattgatgaatttgaaagtaccatagaagctttaatataacttgattatactcagcatgataattctaggattgtaaattgtggttcaggtttgattgttaatccttgtttctatcttagagttctgtctgttgctaaggacagcaactaataaatctgggaattgtttgatgtgttgcaaacacatcttgtttttagtctagttttaggttagaatttgattaattacttaggtaaatagcttagaattagttgagtttagtattttattgtttaaatctaatttcaataccaattatgcattttcaggacaaaagaggagaataaaggccaaagaaagaagaaaacaaattttggagtatcacgcgagtcgcgccactatcacgcgagtcacttggaagaccagagaagatcacgtgggtagcgccgttactcaagtgggtcgcgtgggaacttcaagatttaagcatttcaacgctgctattccacgcgacatacttggagtgtcacgcgggtcgcgtgaagactcaaagaaataaggaattctcatctgttactccacgcgaggcacttcacaacccacgcgacacgcgtcattcatttctgccagtccacgcgactcgcgtggtatcgtgcgcgagtcacgtggaatcgttttagtttccttatttaaattatatttttttcagatttggtattatattaggattagttgccttaattaagtgattctataaatatatctagtttccttaattaagaagatttgatttagatttggaacagaaaataggccttgttaccttaattagatctatctataaataaaggcctctgggggggttcaacatatacagacacacacactacacctctctactctttctttcttttctctaagcctttggtttcttgaagcttatggctagctgagcttgtattgtgggaaggccatgaactgatgtaactcctctgtaacttgaattggtattggttttaatgctgttttgattattttattctactctgtgctattcaatgttttattcttatttggaattggccattctatttaagtattgagggttaggattcgcaatggacacgttggggttctaatttctgacatgtttagaataatagttgttcttcgcctaggaatagggatgcgtggctacggactttataatatgttctttgtatgcttaatttgatagatttcaccaagacattgggttttcgattcaggttaaagggttgattcactaagacattagggattaactaacttaggaaagacttattctccgaataatcttaacaagatcgcatgagatatattctttgaatacttagtttgacagattcactaagggtttaggtttctcgatcgaactaaagggtgaaatcgctggttaatgctcttaagagtctaggatttacgaatttaggaaagatttatcacgtgtgtgacctaagataataaaccaatcaagtgaaggaggtaggaacaaaagggattgggcctgaccacaattgtttcttccattggtaatttctttacatttttattgcatttattttatgtttttattcaatcaacaaaccactcaacaactatttctttgttcttatttttctgtttttaattccaatcatttagaattaatattattgtaaaaatcacccaatccctgtggagacgatactctacttacctacttttattacttgttaacgatcggtgcacttgccgtatatacattcgcataatcgcgcaacagtaatcgattacggattctggtaatcgattaagccaggaagcttcagaaaccatattgaactatgtaatcgattactttaattgataatcgattaaatcagcagaacttgtaaagtataggcatgtaatgtaatcgattactattctttgtaatcgattaagacagaaaggtgatatattctgattagcctatgtaatcgattacaacaagttggtaatcgattaaactgttcatcaaagctgtttataagagaactaaggtaaaataatcgattattccgatatgtaatcgattacattgttcttgaaaagttttctagaaagcaccaagaacaaaataatcgattcatttcttaatataatcgattaatccagtgaaaacattatttttccaaaaactcttcatttaattcaaaaccttagacaatttatcaaagcattttaaatccttttacttaaactaattcctttaatgaatgatatgaatgcaatgcatttggatcaccagaaatgcttcttccttttacattcaatcacaaatcaatcttcaaggcttcaaggcatgttgaaagttcaaaaccttccttcttgaatcaatctatactttgtgcttcaagcagctccccctgagttcaacactctactgcggtataatccacatacaactctaaaaaattcttccttgcctgattcaaaaattcttcaatcaccatttccaattcttcatcatcctgtattggaaaccccatgtattgttcatgctgccattgccgtcagcaaagtgatacaagtcttgtcatctagacctaattttggacgtatcttctcatgcaaatcacccaatgttgcttttcggttgatacgtgtcatccttttctcccattcaaagacaacacctcttcgcccttcaattttccttccattgaaaaataacacaacacgaacacactccacatcacttgaactcattttctgccctcaacaaaaacaacaacttcaaattttaagaaacaacaaaataagcggaagaacctaaaccctaatacacacgcctgaagcacacaaacacccaaaaccctaaattatgaaacataaacccttaacccttgcccctataccaaaagccataacacaagcaccataaaccctacacatatccacacaccttaaagcctaacccacatatccacacaccctaaaccctaacccacatatccacacaccctaaaccctaacctacatatccatgcaccctaaaacctaacccatatatccacacaccataaaccctaacccatatatccacacaccctaaccactaaacactaacacgctaaaccctaaaactaaaccgaaatccataaaccctacctctttaacccaaaccctaaaccgtaaacactacacattaaaccaacatacacactaacaatttcctatgaacctaacatctatgtcgctaacaagttcatatggccctaaccattttctaattaaaaaaatataacaaattaaataatatacaaaattgtttaatcaacaacttacttctttgcagggcttcgcttcagaaacttgccaatcccaagctctagatagaaagcagaacaactttcgcacagaacgtcaaatggtagactttttcgttgtgtgagattttggggctatatatagggaaaatggaacccaaacaagcctggctagggcgtgtttaaacacgcctagcttgggtgtgtttaaacacgcctagcctggacgtgtttgggtacaccaaattcccaatttgttttcccattgcaccatttgcccaatttcttaattaattgtattatttttaattttttgccgctatctaaacgtagtcctgataaaataccaaaaattgaagccagatagaactttataatatgaacttaattttatgaaaatcaaatcttaacattttttcccgattttctagaataaaatagataaattaaacaatcaatctaattactaaaagtagagcattacagaaggcagttgaataataacatttaattaattatgacttttttttaaaagaacacaacttctaaagttataatatatcgagtttctcttcccagaagctttattaagagtaatctttatcgcttgacggtgctttgtataaaaaagttttctagtaaaatcttacaaagatactatcgtataatactaacaagcttgaaaaaaaaattacattctgggcagtgcagaatttgattttatcttttaccgtctgagtagaggttacttttgaagtttgaaaacagttaataatgatcttctatcaaagggcgacatctagtttgggagaccttaataggtcttccactttgggaaagctatattagctgtcggggatgtatcgcgcggttatcttttgtgaaggctaccagctttgaaagtaatgtaagtgaaattttatacgaacaatttaattgtgttggtctaaaaagtgtacaatccgaagggactactgacgctatctgaacaaagtgtacatggttgtcaatcaattcgttatttgttagctacgtcaaaaatagtaaccaccagtaaaaatttgttaatccacatgaatcgcttaattaaaactttaatatgcttctcttgtgggtcatttacttaaaaaccccaacaaatgttaatgacccaagaaaataattaaatttttaatacattatttctgtcgttattagtatagaattaaattcatattcaggatttacattaaaagtttcttgtactttacattattactataagagatcgagaaaaaaaaacctctaaacctctaaacccggatactgcagcggttcccggtctgaccgatccaaccgaccggaccggttttcacaacactgcaacctagcaccctttcaaccacaatctaggatcctagtaccctcccggacaccatcccatgaagattaaggaatttagcttatcttatctcaatactatattaacactatcagataatctcaaatgaacaacaaaatctgatggaattcacacatgtaaattatactttaattcaaaactttcatctcaacccacattcattctgttttattccactctatcgaatagacctttatgctacacaagcctaagttttactacaatgctgccaaagttatggtacacaagcccaagctatgctacacaaaccttaagttatgctacaccagtctaaattgtgacaatatttgactaatagaattaatgatttcaatgctaatataatatttttattttagatagaaataaaatattatattagcatgagataacataaacaaaatcaagacaaagataaaaacaacataaaaagaaaaaaaaatatgggtgatttaatataataatttcataaactatgttagctaaaaattaatgtgtttgatatttaataattaacttaattatatgttatggttgggtcgggtttaaataaaatagagtttaattgggttggctttgatccaaacccttaaaaaattcaacccaaactatttgagttggtttaggtatactggtaatcggacatgtgaacaaccctaggactagggacgaacccaagggagccaataggggccttggcctctccttcccttataaccctctatgtatatatgagaaaaaattaaaataaaaaaaattaataaaggaaatgtttcaatatcttttaatccttgtaatttagtgctttttgcttttcatccttaaaaaattattttttattttgtttttaataattgcaaattatgttcattttttgtccttaaagcacttttcatagttttttccactatttaaagtgttatctaaattgctttaaagactaaaaacaaaacaaacataatttgcatggactaaaaataaaaaataattttgcaaggacgaaaaataaaataaatgctaaactacaaggactaaaaaagtatttaagccgaaagtaaaatatataagaaaaataggtttttgagttgatatttgcttaaaacttttgtagtagtagatcatatttctaattttatccataaaattaataaaaaaatttaaacatatatatcaaataattatctattagaagttaaacatttaaataattaataaaaaaatttcccccctttggtatactcctgaatccgtccttgcctaggaccacaaatagttgagtacattttcgaggaattaaatgcaacaaacacgaatgtttaataaggaccaaaaccaaaatttgctcattttaaaaggatcgaaaacaaaacaaaaaaataaatctcagaaagattacagacattaacactttctttcaacgaccaaaagtaaagcacgcaaaatttataggaagtgaagtctttagtttttcattttgattattcacatcatttcgtctcatggataactttgactttaaactttattgcaacttctaatgcagttggcatccacttcttatgtgtcttcagtgtatgtgtggcagcatatgaaaagtgagatgttgtcttctgaggtgcattttgaaacattttgaagttcagacttcagagttagattcttcatcattctaatgtagactttgatacaacttcgttctaatgttggatgctcttattgtggcctttaacaaatcctctatgtaaggccttaatgtcttgtccattgccataaacaagtactcagagggaagcattctccatcatactgatggaattcaaggaatcttttgagttcttcatccatgacagattttctgagacaacctttctgagcatcattctgagcaactcaaaatgagtgaacatgtctgcatcttaatgagtttgacattgaaacacttgagcagaatgttagtcatcagataacccatcatcttgataattttgcatttttaatggcttgtcataattaaaactaaggatttggattcaacatgttacttcttgtcttgtggggcttggaggggaaatagtttcgttgtgagttgtcttcatcacacaactaattcctctttcttcctttagctggaacaacttgcacaagtttgaatttgaaattgttccattggtgcttcttgttgttagtggttcaagactcctcttttcttcagcatagtcatgagtcctgctactcttagaaaatgtgagtatgttgcattttagtgttgtccattttgtcaccattgcaaatgtttgaaactccctttcttttctctgactaccttgttagtttaggacttcactactacaaaataggcttttaacatcgtttttttttactttcaacattggtttttaaccgatgttgaaaccaccgatattaaaagtatccatgttaacatcgattttcaaaagccgatgtcgcataataagaaataaacgaaaagaaaatgtaaaatatgtaaaatcaacatcagtttttactaaaatcgatgttgtagtacaccttacaacatcgattttagaaaatccaatgttgatttatgtagaacaatatcgatttttagaaaaatcgatgttgatttatgcacaacaacatcggtttttagaaaaatcgatgttgatttatgcacaacatcggatttcaaaaacccgatgttgatttatgcaatacaacatcgttttttagaataaaatcaatgttgatttatgcagtaaaacatcggtttatagaaaaatcgatgttgattttctaatttttttaatatactgtctatttttttaatattatctaaacctgcaaattaaaaaagaccaatccaggcagtttcacagtacaaatttttatattattattgaataattactatgaattataagtaatagtcaaagcaaacaataatgtcaatacataaaatcatttactataaccgattctaattaaactatttatacaattttaaaatcccttaaacacctagtgtttcattttaactctaagataaaatcttgcccactgaatgcgaattgcctttaatctctttggttccaatggtcttggatcagtaaaatactgcatgatataataaacataacttaattaggttaaacaaaaattagttttgaagtaaataattatcatctcccaattatccctgaaagctcctagtactatcattgacatccaatgcatcacataatagccacactcagtgcttcctctttacttattacattaaattcaataagatattaaaagttaaccaaaaattagcgtacacagtaataaatgtaatttttaagacatcaactattgtttaaatgacttactttaactggaattcatttagcagtagccttggatttacttccttgaatatcattgagtcccttcaaagtactggttaagagaaacatgcatgcatattgtacaattaaatattgatgtcttacaaataataaagtaaatgtcttacaaattacaactaacttgttaataattcctttcaagtagttatcaggcttattgtccatggaacagaacaagacgacaacattgtccttaggacatataacgactagttgtcaatatgcattgcattggagaacattaagttattatagtgcatacattatttaaattgatttgtacaattttacttacccattcaagtagactcctaggtagacatgtttctgtgaattctgcatccatttcttaatataatcttcatattcaaattgtgattgcccatatctctatatggactgtggcttaaggaatccatacacagaggcattattcgattgcagacttaagtcattcatatgcctattgttgttaaaataaagtaaattatgcatcaatttaaaacaattagttatgtaatggactgtaatgtacagtgatttacagaatccacatttgtaaaacaaagatgttaagacattgactaccgtgtattatttcaaaaagatcttcatgctttatatacagggggacgtccttattataaatctcaaacacagttgtatcccacgacacctgcataggcttgaggaaaagttgcaggatcgtcaatgtcatctggtataagggatcgtcatcaggttctgacttatttataggtttcgctggtcccttaggtctcttgtttatcctacatagttaataaacacaagccaatgacaatcaacactttatttgtaacaaatcattttttaatgataacaaacacaacaaaaggaaatacatgttttgtaaaaggttgtacaagatgtgtcggccaagcaaggaaggtgttaagggtctgactcactaattgaacctcttgagtgagtacaaggacgcgatcattagcatctcgaattttctcaacatcgaccttcacttgatcattggcaaaagggacgttgtggaaagttgtagacccctcataaactcttccaagggcaaccaggcggggaggattgtcatcaacatacaacccacgtttgtctgatgcacccgtgtctgggtcctgccccaagggatcaacacaatttcccttagtgctgacacgggcagcagacggaccaacctcagcctcagcaggcagtacgagtccatacgattgcatctaggactgtatctggctgaaggaaaacaatagttgttgagtcactttttcagtgatcgattgcttcaacttgtcctaatattcttttttattcgatccaactctaatgggatgatcaacgtagacttgcgggagcttgctaaagtcggtccaaagtattgtctaatcgtcacactgactccaatagcacggacacggccaaagtgctcgaatcgcccaatggcagcagtcaatacatcctgacgtccatgggcgacaaagctaccctgtgtagattgctcttccagggtatgctacactcaacaaaatattgtatgagtttatgaatttattgttgttattataattaatgaccattgagacaaaaaattaacttacaatcctttctacaatttcgtgtgccgcctcagatgtcatttctcctaattttttggtgcaagcaatcttccacttcacgtgtcgtctaatgggagatggaggatgaatgattatttttgtgctcccagattgggctgcttcctccaatcatttcttttgtttttcctccgttaacttttattctagtaaatcataacctccacgagatatgtgaggggcaatgtttagtttctggatgggctgagccttctttctaacatcctgccacaattagacaaaaacttctcaacaaaatgcgcttacaaataatgtatgttaactgttttattcataaacaatgcaagtcaactaaccttcatgaaggatctctacaactctgacaaaattgattccacttttctttactgatactgtacttctcacagacagtgtcatcctcgtcctccttgccttgtgccaaagcccattttgaggttaaatctgacttaaactgcctccatcactcttctaccgtcttaaggattttcttcttcatcctttggtcggacacttctgatatatcaaattcagcttgcgatacaaaaaatacatttaatagttaatcaataacattcaacattttacgatttttagtacaaccaattacaataacattcaacatttaattcaaatacttgaatgtcctcccaaataaaatccttttgagctgcaagaacttcttttcaattgaaaaatgtaacatccaccttgtcccgagcgatgatccccaaatacgtccttaatttctttctgtggggaccatcaacttttctagtggcaggatccacatgaaccactggtctctccttcctggcgggtctggtagctaatgatctagacttagttgcttttctagtcttcttcgacgtagatggtgaaggtgttgactcaggaggaagaggggagctcagtggtgtagtcatgtgcctgttaaaaaacaacattaattaaagtcaactcaaaagtataggaaattacgtaattgtaaatatggaaacaagtatgcacaaaaaaatattacattaaatgatgttaattaattatccttcatcatgatcattacaatttgcatggacgtcgtcaacttcttctcccccgttgacgttaggcatttgtgtcgagaaaggagtgagaccagtatcaagggttgaatcatcatcttcaagattaataccaatggtttttccatgtagaaccactgaccaccttttatcacaaggatcttgaacataaaacatttgtttagcttgttctgccatgatgaaaggctcattctgataagctagcttcttatgatctaccaaaataaatcccaaatcatcggttcgtacaccgatattgctatcaacccacctacacttgaaaacacacacacaatgtatttaacataattaaacacccagatttcatcaatgactccaaagtaagccatggacgccaaacgaggattgtggtcatgtacagtaacaaagtgttgggattcagccctaagactaaccccactgttttgcattgtactcttgtcattttgtgatttgatgtagaacgaatacttgttgatatcgtatccttgccaacttctaacatttcttttaggcccatttgctaacttccttaatgtttcagaggcattatcattaccaaagattgtatctttaaaccaatttaggaaagtcttgttatgctctttcaacaccctattcttggtaatttttgggttactttccttgactaaggcgtcacgaactatgtatggtaggacttcattactgttattcagtatatacaactaagcttgttgcaatttgtctagatcgggagttataacatgcagtcctcgtgaaccttcacctctcactctctcgtcatgccgagacttgggaatcccaacaggttttgccttttcaatgtactatgaacaaaattcaatagcttcttctgtaatgtacctttcaacaatggatgcttttggacggtgtatattctttgtatatccttttaagatcttcatgtatcgctcaaccgggtacatccaccgtaaataaacgggcccacacaatttaatttccctcaccagatgaacaattaagtgaaccatgatgtcaaaaaataaaggaggaaaatacatctccagctgacatgagataatgacagccttatttccaagtcatcgaactttacaggtgtaacaccccgtaggcctccggtgcgttatcattaataatatcagttaagcgcttaaaaacataatataaaacttagcggaagcaaagaatcgcttttcttgattcattatgtatggaataaaagcatatcacagagaacatacacacaagacagatatttcacacccctgctgatccagtttatcatacagtacacatgtagatagatcatcagaaatattataagtatactcaggaggaacatcatatatcataacaacatcagttctgtacatacatatatacaacagtatcacaccacaccgtggtgatacaaaagaatatctgtcctcaccgagggtatacagaactatacatatctttggtatatacgcaccatcccttatcaagggtacatgacagaaacaaagccaaaactgagccttcaagatccctctgctgctatcagccaagcaggaacgtctctactcgggcctcctgccctgagactgctctcttctgcctgaagagtcacctgaaatcataaatccccacatggggtgagatacatatctcagtaagctcagggtccttgggaaatcatccccaccctggcccacaattcacaatacccacatcaggcaaacgtatcaaacatggcccactggcctggccctctggccctcatcataatatgagcatcattatactccaaacacataaacagatggcagagctcctcaatgcctggcggagctcctcaacgcctgacggagctcctcaacgtcaatatcagtgtgagaccaaaaactcacacctgtgtcatcaaacacatggcagagctcctcaatgcctggcggagctcctcaacgcctgaatacatggcagagctcctcaatgcctgtattcatctattggccaacagatctatcacaatcacagcatacatgcatccagcacagatgcacacatatcattataagaaatgtaacaaccaatgcatgcatcatgaattatgaccaacactcccccggagtgtggtgtgcaaccaaaatgggatatcattccccagggactcagaacttacctggcaaagcctcgctctgcagttctttccctgctctgtggctctcgccaccaacaatctcgcaatcaaggcctaatcaaggcacatgcaatctcatatcaaaatcaagccaacaggcattccagcacagaacaatatcatattcagaattcccctatcctagggttcaatcaagctcagcccacaccaggctgttcacagaccatacaaggtccctcaaggctgaagatcaagcatctgagtcatcccagactcaatgtataacaactatctgagcataagctttcctcagccttataactcaatatatctctggaacggtctaacctcaacacaggcaccgttcaactagcctctcaggctccattcaaacacaatcaaggctctagcatgtcagataaccaacaggtgacttatcacacaagccacacatgcataacacagagccaagattcaaagtcatctaaattagaaactgaaagctaatccttcatccatacatcgctctaaacaagtttctctacaggaccctgggctaattctagccccagctcatatgggtcactattcacaaagaaccccaaattcaaaatcaaccggagaaacttgagtttcttacctcagtggcgaccagaaaggctaggggatagctttccttagctctgttgtccgttctgcgccttgggtccttgctaaactcaagttcctgagcttttccttcagaaatgggttctcactcaattgaggcttttcaagagaagggatgaaggattcaagctttctaggtgattctctcaagtttataggtcatagggaggtgtttaggccaaggtataaggtcctaggaagcttggaacaagcatcaatggaggtttgggcatggggaagaagaacagccttttccctctcattttcgtgttttggccttttatattgggcctgcccgaggtctggcgcgatccgcgccacaaagtcggtgactctggcgccaaccgcgccattctcgcgcctccagtgccagcttccagaacatgtggcaccatcaacgccacactggcgccacccgcgccattctcccctgacctctggcgccaaccgcgccacacctggcgcggtccgcacggaaaaccagagagaattggttttccaggccacttctcgtgtgatccgcgccacccttggcgctacccgcgcgggatggaaaacctttggcgcccctcgcgccacattgacgccccaggcatcaacttccagagaacttggcgcgatcagcgccaaccctggcgccactcgcgccacacccttaacagggttttctgctgaggaacctggcgctatccgcgccaaatctggcgccatcagcgccatgcctaaggatcatcacaacaaggttaattactttgctacaaatggcattgaagaaaaaacacaggcgagttatgacatgcctcactttgttaggcaaaatttctcgaatcgccacggctaacaattgttgcattaagacgtgaaattcatgagactttaagccaactaatttaagatctttcagctgcacaagattcttaatatttgaagagtatccctgtggcactttgacacgacgtagacattgacagaaacttgtcttctcctttcttgacaaagtatgacatgctgaaggcaagtatattttgttatcattagacattagatttaactgttcacgtgtacccatcttaggtagatcttgatgagtattcaagccatcctttgtattgccttgaatgttaagaagcgtgtcgatgacactatcacacacatttttctccacatgcataacatcgatacaatgtctaacatctagatcacaccagtatgaaagatcaaacaatattgaccttttcttccatatacaacttttacttgttagcttcttttggatttttccaaatatagtattgatgtcctgaacccgctcaagaacctgctgaccagttaacggtatcggtgcacttttatgctcttaacttccattaaaagcttttttcaatcgtcggtaagggtgagaaggttttagaaaatgtcgatgccgagtgtatacagtttttcttccatgttttagttgtacatagcttgtgtcttgttcacagatagggcatgcacgatggcccttaacactatattcactcagattctcgtatgctgataagtcattaatggtacaaaataacattgcatgcaaattgaatttctcatttcgatacccatcaaacacggcaaccccctcatcccataactttgtcaagtcttcaatcaagggactgcgataaacatcgatgtcatttcctggctctcttgggcccgctatcatcgtagacaacatcatgtattttcgcttcatgcacaaccaagaaggtaagttgtaaatgactagcaaaacaggccacaaactgtgttgagtgcgtaaactaccatagggtttcattccatcactggcaagtccaagcctaagatttgttgcctcttcgccgaaatccagatacaaacgattaatcttcttccactaggaggaatcacccagatagcagagcattctatcgcattttctcccatttgcatgccatgtaaggtcttttgcatcatcttcattagcaaacagatgcttaaaccttggagcgatcggaagataccactttctttgtgctttcttcactgctacactcgtcatcatccttcactttataccgtgataccacacacctggggcattgatgtgtttcaaacacatcttaattttaggatagtttttaggatataatttagataaatacttaggtaagtagcttagaattagttaagtttagtagtttattgttttaaaactaatgtcaataccatttatgcatttcaggctcaaaagaggagaatcaagggccaaagaaagagaaaagcaagtctggagtcccgcgcgggtagcgtggaaggacagaatggatggcgcgactagcgccatatctcgcgctggtagcgccagaacctcaaggattaagggttttcttctctgccaacccgcgccagtagcgttatatctcgcgctggtagcgtcagaacttcaaggatcaacctattcctttctgccaatccacgcgggtagcgtggatgtcacgcgatcagcgccattctctcggacatgccgcgctaccagcgcgggatcgcgcgcgagtcgcgcgagaggattttctgaagaaaaaaaataacgaattctgcacgtgaaaagcacctgggacttaaatttagcctggcctatatatagaatgcgtcagaaggtactagggggtcagaattagtactagggtttagcttaggtcactttcttcttccctaggtcatcttcttcatcacccaacctgaggaatcaagcatcaaggctgagtttctgcatttccatggaatatcttgcagctgtgatgtatttgaagcccatggttggctaattttgtagtgtggtaaggccatgaaactatgagagcttctttgtaacttgattggtattgaatcatatgtgttaatttgttttactctattctgcatttctctctactcttgcttgaacttgatcacttcaattaagaacatagggttagaattcgcaatggggacgttggggttctaatttctgaactgaattagggtaacagttgttcatcacctagggatagggatgcgtagctgcagagctataataggatctctcgaaggcttaatttgataaatttcaccaaggaattgggattttgattcaagttaaagggttaattcactaagggattatggattatctaatctaggagagacttatttctgaacaattaacacaggaactgcatgtgatttgttctttcgaaagcttaatttgatagaatcgctaagggtttagggttcttaatcagattaaagagtgaaatcgctagttatctaggatttgcgacattaggagagacttatcatttgtgcgcattcatgtcttttaaatggttaagtgaaagagaagtaatcatagtggattgagcttaaccacacctcttcatccatttggtaattcctcaaacaatttactgcttatgattcttactttctgttttaattacacaaacgaaccaacaacaattttattttcgtattttctatttcaatttcaatcataatagttagcattactgtgaaaatcctctcaatccctgtggagaacaatactttacttacactttattacttgataacgatcggtgcacttgccgcaatcattttcacatcaggcgtttatgcatttcttcaaactcatgtatgtacagtatgcaatcattagggcatgcatgaattttttgatactccatacccatcggacacagtatcttcttcgtcttatagtaactttttggcaacatgttttcctctggaagcatatcctgcactacttgaagcaatgaattgaagcttttgtcacttcacccatatctagccttgacattaaccagacttaacaccgctaacaacaacgtcaaagacttcttgtaccctgaatacaaagactcttgtccatgatcacaaatcatatcctctaatcgatctcccatttgtacatcaatcggttcaatttgggaccccctttgcatgtctgtcaattcaccatgtgatatccatgtcgtataattcttccaaatcccatcatacataatatgttcctatatgtcgtctagtacttgtcgtctcccattcaaacagtttatacaacaacaaaattattttccatcctcattcgattgacttctttcgaaggaaaattccaagaactgttcaatgtcttcctcatacgtagcgctcatgcgaattgcattcatccaactttgatccatctaattaataactctatgatactcacaaagttattccatgcacgaaaacctcacttttttcattaaaggtgtggacctatcccattcagcaagacagttttttatagtagattcatacgtaaaggttaagtcttttttcttaaatttgatgaaatttcggcagcatttcgcattgatctccaagtacacgatatgaaagcggtgacatgaattccatgacaatcaagtatgcactcggagaacaaagtgaatgcaccatagcgaaatttcaataaatttaataaaagaaagttaacctatgcgtatgaatctactataaaaaatgactcttctcaaactgtccaaaaggacaattcaagattcaatacagtgattaatccaaaatgtctggaagaatcaatgtattgaatctcaaatgggaaactaaggttcactcataatgaacattaattgtatattgatggagtgcttttagttaaatatttttctatccttcttagcttaattgaattctcttgaacttttatttttccattctaattcagtttttgtcttaggcaagcaagtgggcttaattgctaattgtagcgtattttcaaattttatgctcacttaacctatctcccttgtataggacctacagagctctacagaactccgaatggagcgttctagtagtccctggaaagataacgaaaagatctataagtttgcagaaataagccgaggctaattctaccattttgagggtcattttgggcttcaaagtcagaatcactgcacttatattttgggctacaaatttgatttttatggttgtaaatagtaaataattagaattgatgggttttgttcatggcccattcttttcttcagacttagtcactacatattagtgactttggacagacttatcaattacatttacattaataaaaacaattttacatttctctttttaagtttttaggatcaaaacccttattcttcattttctctcaattgttcttcatcttcttcattttcattttgctattcttccattttcttgcacttactccatggggctttcactgatgatgatcatgggaggctaaatcattaatcaatccaaggatccaacccaagcaagaggagaattggagttccgatttagtatttcgaattctatttgaatgttcaccttcttcttcaatttctattctgttttcatgattatgaatgcatttaggattgaaagtggattaggttacggattcatgtcctaatttcaatcgttaatcatcgattaattggatgacatttcagttagggttgtgatttcaattaagttgggagttgattcgattgaactgcttctagtgaattgaatgactgttcataataggataaattcatgagaactatgatgattcaaatagcttggtttggtgaattggattgatgcttttaatctgctttacattacttgtcatcaattctgctagtttttgcgttgttctttaatcttagcttgtatttgcatatgttttaattgttgcacgcaaactgttcgataaaatcccccttactgttagtagtgatttgaagctagaaccatattgattgtgtctctgagttgacctaggttaatcatgtactacagaattagcatagttaatttgttttggagcgtttcggcaaatgcatatcatatatataaagcaatagtcatcaatcacataacacaaattacaaaagaactcgtatacatgtaaaacctaaaaaaagtatgaaagacatttgtacctatgatgatggtcactaacaatttccaacaatgaatcttgtgatgatgatgcaaacaggaaaatgaaaagtgcctccaaattacattaaacatgttatattcaaacctttaagaaactcttggcaacatgatatactcttttatcaatcaaaaggtagaagtagaagtgatacatggctatgatatctagaatatatatatatatatatatatatatataatataagtgttggatatagggggagcatcatgaagaatggaagactttgattcaagattggttttgagctttcaacatgcttggatgccttgaagttgtaattgattcaagtgtaagagaaaggctaatctgatgatccatgcattgcattcactcattcattcataaaattaaatggttttcataaagaataacaaagcttttatattttggttaaggttttaatctgagtgaaaggtttttggaaaaatgctattttcaccggtttaatcgattaccttactaatataatcgattattatgttcttcattcaatatggaaaatcttttatgaacattgtaatcgattacccatcggaatcgattatttggcctttgtttacaagaaaactgatttgttaatgattttaattgattacttaagtgttgtaatcgattacatagttaaaagattattttaagccttactgggataatcaattactattatccgtaatcaattacataggctatttgagaaaagtcactttcttgtcttaatcgattaccacagcttgtaatcgattacacagttcattttgaaaatataagtcttctgctttaatcgattaccaaatcttgtaatcgattacataatgcattttgttatcctgagactttctgtcttaatcgattacagctcgggataatcgattattttgctcgttgctgaaacccagaaacattcttgatcagtttaatcgattacatagttattttaatcgattacataagcgaattaatcgattatcaggcgcgtttaatcgattacagttagttacaaattctgttataaataggattggaggcttagcttgttttctaactttgagtgattgtactcatttgtatttctgagctcacacaagtcttctaagctttccaaagtgattttcacagtgtttttacttcttgcttcattcaaaacatcaatgggtctttgaatgattcttgagcaagattcttttcaagattaaggaaaagcatgttctgatttggtttgcttctcaacctgatttggtaattcatgtgcataacattcattggatcatcaggttgtctctctccttaatttttgtgtacaaatttggttctaaatttctgttgtattttgctattgtaaagtgggttcttcttgcttggttttagagaagggttctctaactcaagaacagagtagtgttctctggttcttgctccttagatttctaatagggttttagattactattctttatctagtgttgataaaggagagggttttgtaaaagcttgtaagaacagaaatttataataatggaactctaatctagtgttgattagaagaaactggatatagctttagttgtaaagtgaaccagtataaattgcttgtgtctttgattctatttctctatctctcatcatattcattgttcaacaagttctgtttagatctattgatttcttgggctgagacatttgatcaagtaaaaagatttcttggttttgaaagtgataaagatcctgaactctgatttgaattagtttttttaaaataccaaggttttaaccaattcacgccccctcttggttattgtgagtatgcctattattttcaataaggtcatccaggaaattagtcacatccaaaggagagtgttattagttcaatgtgactatctttgtattcactcaatagatatttaaaattaaagcataaaattcttcaatatgttacatatatgaaaaaatttcacttacaactcataattctaactatatttcaaaatatgtaatagagaatgacaaagagtcagaaagaggttatgaacataataaagtaagagtcatgaaaagcatgcaaataagagagaattcatgtattgtatagaggaagtgaaagacacgtaaataaactataaggaggtagaactagaactagtactataagtaccttaagtagtatgcttcttagaaaagtaaaaatgagaagcaatttaatttacatgttgattggctttgtagtgcataccgtagcatttacatactatactaatgtattctgacaatccacatagaaggataaagagacagagagagaattaattagttaattaaccaaatgtcttcctaacaagcatttcttctaaattaaacttgcacagaccagcctgctctccatttgcatagtggagaattaattatgtgcctaaattgaattatgttataaccttgcgtttcaagctttgtttttggcttttctgaggttccacgcttggggcgtgtgggtccacgcctggggcgtgggaaccggcccagaaaagcaatttcttctggcaagccacgcctggggcgtgggatccacgcttggggcgtgggaggtccacgcctggggcgtggagtccacgcctggggcgtggggagtgggccagaaatgatttttggtctggcagcccacgcttggggcgtgggattccacgcttggggcgtgggagtcgcgcagaggcctatataaggcccagaagctcgaaaaccatggctatttcttcccttcttcttcctccttcgtccagacctccattagaggagtttccgagcttcctaggaccttaaacactagcctaaacacttaaccacgacatataactgtgattgaaccgatcagaaagctaaatccttcatctttgtccctgaaaaccccatttctaagtgagaagaggaacctcagagggaaagctcagagaacttgagcttggcgcagaaccacagcgtgattagaacatagaagctagaggaagctgttctgaggctgttggagtcgccactgaggtaagaaacacaagtttcaccgtttaattttgaatctgaggggtttcatgaatagtgacccacttgagctggggctagaattagcccagggtccagttgagaaacttgtttaggacgatgaatagatgaaggaatagctttcagtttttgattctgatgactttgaatttttggctctgtactgtctgtgtggcctgtgtaatggtcacttgtgttgtatgatgatataccagagccttagttagattgttgttgagcctgagggactgatggaatgagactttgagtggaactcagtccattctgatgaaaattgagtttaaggctgaggaaactaggccaaatggttatactctgagtctgggatgactcagatggcttgtatgcgacttgataggccttgagtggtctgagagcagcctagtgtaggctgagtttgcttgaaccctaggataggggaattctaatattatatgtctgtgaattatatgtctgtgaactggttttgatatgagattgttatgccgtgattaggcattgattctgagactgttggtggcgggagccacagacctgggaaggaactgcatactgagaccttaccaggtaagttcagtgttccttgggaatgaattcccgctttgactgcacaccacactcttggggagtgttggtcatgattcatgatgcatgcattggctgtgacattgattgtgttgattatatttagactgtatgcatctatattggatgagtgattatgattgagttgagtctgttggccaatagattgaatacagggtatagagggttctctgccttgtattgtcggcattgagggttctctgccgaggcatagagggttctctgccaacggcatagagggttctctgccatatggaacggcatagagggttctctgccagggcatggagggttctctgccccttgttacgatatgtatgttatgatgcgggccagtaagccaggccagggggccatgtgtgagatgtttagatgtgtatgcctgtttatgtattgtgaatctgtgggccagggtgggaatgatttcccagggaccctgagcttactgagatatgttatctcaccccgtgtggggatttatatgttttcaggtgaccattctagaagagaagatcagtctcagggcaggaggcccaactgagactaagctgcttgactgaggagcagcaagaggagctagatagctctattttggttttgttttctgttgtatagctctgtataccctctgggagggctgatattcttttgtatcaccacggtctgtgtggtgtggacattgatatatatgtatatgtacagaactttggtacatgatgatatgtgatgtttccctgagtaaaatttgtgtatatctgcttattcgcctatacatttatgcatctgtctttatgatgtctgatatggaaactggatcagcaggggcataatagatgatcttgtgtgtttttatctgatagttagatattccatacataatgtataaagaaaacgattctatgcttccgctgatggttttaattatgttgtatgcgctaatctgatattattaatgataacacgtcggaggcctacggggtgttacaaattaagaacaagacaatgttcaggctaattttcccctcttcaagtttcatttcaacttccttaactttatttaggactaatttactatggactaattgtctatgattttgaggtgtatatatataattattatatgtaacatcttaatatagttttagaagttatatttttattattgtttataagagtatattagtatagtattaaagataatacgcacacatttagattacataatatacattatcattacattacacaccacatttttcatacaggccatgagttccaatattactaaccatacatcctaattagagagcaaaatgtaaagttaatacaaaccataagttctagcaaacactatatacagatgtactattcaacagtggaatcatccattttttttctagtagagtcaatccccattcagattccatgggccaaatgaaccacttgctcagattcagaaattatcagcaaaactctcctcaggatcagattcatcattaagatccacattacctcccgggacgggtacaaaaggaggatacataggattactgctaaaggatatattgattggttccatgggtggatcaggatacatatgaggaaattgaagaaaaggatcgttagggttaaacatattattgagtacagagataggaaagtgtgcaccaaagtacacatacacacgaatcacatgatgcatagtaaaaacataacaatttctagcttcatcgcgatcccaccaccaatccaacgcatcaaggaatattatcactgagaccatctatataaaaaaaaacacatctagtgagaaaaaaaattctcagtaggcaaaactaaaccgttcaataggttagtacgttagagcttcacaaatacattccataaaatcaatacatatatatataagcaagtaaccattcaacaatatatgcatgaggaaattccagagtgcacatggtctctacatccctaaccgggtgtagtacaatgcggtcatcgtacgtaaacaatgcatgatcaattccaatgtgcacctggtctctacatctttgcttggatgtagtacccattttgtttctaaaatctcgtactggattcagaaacaatctcaatatatcatcacataaaatccattattttcctttgtaacacaaaccgtgagtaaattcatacaacctcatggaaattttatcacaaaaatcatcataatatcaaatatatggctcagccaccatacatatttcattcaagttcatgcaaacttatgcatgggacataatatcatcaagttaannnnnnnnnnnnnnnnnnnnnnnnnnnnnnnnnnnnnnnnnnnnnnnnnnnaaaaaaaaaaaaaaaacatgatagatctctagttagtaagttctaatataccttccaatataaagtctaattcattttcacttacacaagaaaactagaacataatctagaccttatactcctttcaagttatcattctaaaacttaatcctcaaaactgaaccactcaagtatttaaaccatttttcaacataccattcaacttctactctcaacatcaattcaaaagagtcccaatatatatatatatatatatatatatatataaataaacagtccaaatgtcatcaaaatcaattcaaaagaccatcaaaatcaagtccaacaatctctaatattttaacacctaatccataataacacatcataaagtaatctctaagaatatgaatattcagcctagtatgccaaccagaaatctgcaccattaagcatcaaagttagtccaactaaacccttaaatcaagattgaagcctagcctaccttaagcaaattttattccaattcttccaagtacttggctgcacactttaaaatcttgaaggaatgaagtcttaagatggtttggaagaaagaagagaaggaaatagaagtaaaagatgcaatagaagtgaagtctacatcttttgactcaagaaggaataagaagaatgaaagcaaagtgtaggagaaaggagaattagctatgggtttgggagcaagcatatacacatgcagatttttaaatcaaggaggtatttgttagatacagggggagcttgaagagaatcaagatgctgaggatctaaatcttggataagttttaacttttacatgtcattcaattgaaggcatatgtaattcttagatggataagagttcatcctttgatcttttgcattgcataaacatcattcattgtcttggattcatggttttacaaaaggcatatgttctatgaaaaagctttaaagtattcatgattgcattgaaaaagccaaagtgttcaaatcttgttttggaaaaacaaattcgtattgctttaatcgattatcagctaatggtaatctattacttaacctttgaagaacacattaatcgattacaactatatggtaatcgattactcttcacaaatcatagttgaagtcttcctgtgataatcgattatgatatgatggtaatcgattacttggtttattttttaaacatgacttcctatgttaatcgattacatagtgaattaatctattacattgttcatgaatcttttccagaaagattcaagaacattgtaatcgattacagtagaataataatttattacacttcaaaaagtcacagaaatgtcttcctatgataatcgattacgatttgtggtaatcgattacttagcgcattttggaaaacaagactttttgtgttaatcaattacatgacgatttaatttattactttgctcatatatcttttccaaaaagctgaagaacattttaatcgattgaatttattcttaatcgattacattggtggttttaatcgattacattggcggtttaatcgattacattcagttacaacagtctattataaatagttgtttggtcttttgaaaataacaacacactactctacggaattttcattgttttcaaaagccttctgaaagtgagaaaggatattctgagttctgaaactcttgtcccacaaattctatatcttcatattgcattggaagatttcttcttgggcaagatatgaaagaatgtttggagaagaagttctgaaacttgttttcacacctgatgggtaaaccatattcattcatattcattggatcatcaggttgtttctctccattaactttgattgtaaatttgttttataatttctgattgtttgtaactattacaaaagtgtcttaaaacttttctagaatagagttctctagagggaagagaagaaaaaggtttctctttgtcttagtcactaggattctaaaatgattttagatttctgttcttaatctagggttgattaagggtgattgttgtaagcttgtaagaactgaatttgtgaatagtggaactctaatcaagttttggttagaagaaactggatgtagcttctcttgttgagaggtgaaccagtataagttcttgtgttgattactttctttaatctcttcttatcatcttaatctatgattcttttggtgaaatctcattactcaacaagtgaaggttttagtaattgtattcttgagctgagtggtttgattgtttgaagcattcttggtttaattatgataaagatcctattactctgattcttaaagattttttaaaaaggccaagtttaaaccaattcatcccccttttgattattgtgtgtgttcatattattttcagtatttatatgaaaaaaatttagttaggatggaagtctaggaaaagaaattagttacgatggaacttagttaggttattagtttagttctaatgtaactaagtaatcatgccctaaagataatatctaacatttttgttttattcacttaatgcattggtgaaaaatgccatattttagttaaattcaggattataatattggcacttgtcttttgatttcaatgaatttgattataaatttgccctaatcctagttgttttatggttagtacatatataaatatgttatttacattttggaagattagtccaatcaaatccggtgttttgataggtttcactggtatccgaagcatccaaagcaatcaagacaagcaaaaaggggcaaaaaggtcaacataggataattctgcaagtaaattaccccagaactcacctgggttgaagacctttcttcaacatgaagtattaactcgcccaagcgagcaaaatttgaagaaaacactcgcttgggcgagtggagttcttcaacattaagttttaacttgcccaagcgagtaaaacaaggataaatcactctcatgggcaagtggacatgaccagtttccccatgcctataaaaaggcatgcaaattaaagaagaaaacattatttggaaggctggaacatgagaaacaccaaggaagcttataaagaggtgagagaagagagaaaaggagtggaaactctacataaacgggtcaggaatcgccaccttcgtcatgtcttctgttgatatcttgctctacaccatgatcggctagtttctccaaagggctggatataatctttgtacccttttgtatctcttttaatatttgatatatgtatgaatcttttctactcaatctggtaatttcattaagttcttaatgcttgattctacttgatcactatttcatgaaattggattctaagcttgactggaaagtgcccttaggatttgaattgaatgattttactctttaagttacgttgctaggaatagagcataatcttttgattgcaaataacacgagattatgattgtaatgctgggttatttatttcatatgcgagggatcgatattcagtaaatatccttaggattctcaaatgcgagggatcgattcggggtgaattaatgtgttcatcagtaatgttagaaaatgattcatataggttaatattaattggacactagggtatgaatgatgaaacccaatcccaagttctcaaaaattaattaaattcattttactagttttcataatttttcgttatttccataaacccatcaaaattctatttatatttgttgtatataactattgaactgttaactttcagctgggaaaactgagtagctcaagtcctcgttgagacgatctctttataaattatgtatcctgcgaccacattggtacgcttgccaatagtctaacaattggctaccctttttgtctcttgtataccacttccacgtacacacacacacggttccacttccattgctactgattttgttaaaaaaaaaactcacgtacacatgcatgcttcatttaaagttttgtctcttttggtttatactacttgtacttcatgtgtttttcaattactatgatagctacttatgttaaataatcatgattaaatctattctaggcacttctaaacttgccacttagatctattatcttctatcctattctttttgtatcacacactaccatcacatatccacaaataattcaaacatgaatacaaacacaagataaaaaaaatgagtatgttgcaattcaccccctctaaaaagaaaattttgccctcaaaatttataagtacctgtaaacagttcagggtactccattctcatttctgattctaattccaatgtatattcttccaaacgtctttgtccccatgctacatgtaacaccctcctacttcactgtatatgtgcattttcttataaatatgcattactagataaatgacaaaaatacccttggacattttggaaaatgacactaatgtccctttcaaaaaaaagagacacaaataccctggacaattgtccaaatgacaaaatatccctgaacatttgcacaaatgactaaaatacccttatagctctgataaggtcatataagctctagtaaggtcctggaaacctgataaaatatagagtgatcctagataagaaaattattgatgttattcacaaagaaaaactataagatagaattgttagaaattttgaaagatagttcaagaaaaattgaatttaaaataatctaagttcgataaaaacacagaagaaagaaagatgcaatctaggaatttttctcttaatcatgaaagaaatggattcttaaatgagtgtctagttattttattaaattaaaaacaaagggaaccaataggaaattggagaaattattagaaggaaataagaaacatcccaaaattattactaaaacctagtctagtttttaactagtttctaaccaattttagaaaatttaaactttcaagaaagaaattgaaattaagctttcataaattatagaaataattgtgactaatataagaaaaaataaggaaataaagcactaaaacccctaaaacaaatctatctcacggtttaggccaaaaaacacaaattaaacatatttgccccaaaatttgggaatggccgtgtatttaagggaaggatggagaaggctgtagaaatcttgagaataaggcagaaaacctgagaataaagacacatggacagccaaggaataagaaggaagataataggaccaagtggaaagctaggtaattatacatgcactaaaaatctacttaaagctacatagtttttaagcaaataaaacaccctatggctgaagaattccacgtgagaaaccagctggaagtagaagggattagaattatcttgaactaggacacttgtgtggtgaagaaactctaaccaataagaaggaaccaactaaaagttaagacaataattagcttgagatatttccacttaaaggctaagttacctagcaatataaaagaccttgtggggaccaagtggggctggaatttccacggatcacacacccacttcagccatcattttcacctaaaaacaaaaagctaagccaagggtaaacacaaagggagagcacgtgaaaaaactataagctttagaaggcaagtgctgaaattttaatcaagaaaagactaaggtatggggagtattttggtaaacatgaattagatagttgattaggttaatttaacatttaattctctaggatttaagccatgttctttcttgtttaatagaaattaaagttagcatgccatgtgtttgttaaaagtcccaaatgaactagaataatttatagattataacttgaatacctacttagtttaaaacgaaagtagttaattaatataagtaattctggtcaattaataaaactaattctattttgttgtatttgtaattaattatttgatgttgttgagttgttaatttaatatagctgtatgagattatgttgctgtatttaataattgatgttgctgtataatttattatgctgttatataatgatgtaatattgatgtatgttgctacttaatttattatgttgctgttatggttgtatgttgttgctgtatgtatttattatgttgctgtgaactgttgtatttagggtggctgtatgctgtaagtaatgttgctgttgttatatttaataatttctgtatgatatcatgttgctgcatattgctgtatgttttattcggttgctgtatttaattaagttgctgtatcatattttatttgttgaggtagttgtatgaattgatgtagctgtatgatattttaacattcacttgaggttgagctatgatgaagattttatgcctattttattagaaattaggtcatggacatatgattaaagattcatattatatatattcttgagattatttctctaaaagaaattatggcacactatgaaattaattatgatgaagtaatggtgccaaaatcaagagaatttgaatggaagaaatatcaaaggataactgaaaataaaagaaaatcattacattcatttttgcatttttcccctcggagtggagggaggtctcactggagtgggtgggactgttccactggagtgggtgaaactattctaacttttggtacctttgattaggcctctaagatctcagtcatgcatcatttaacaaagaaatcatgcatcattcatatatctgtctataaatgttcttttatgtttctacatatttgttgttcattttaaagtttgctatgtatttagtatgtattctattttctgtcaattatctaatcatgtttattaaatacttacccgagttgtgtctgtggttgacacctgtgatgaccccaatttatttgggcgagcagaagaacagtgaaagctgaaatatggagaagcttggatgaattgcttgctgtgttctggcttgatgtatggttgacctagttggatgttgttgcttttggagttatgttatctatactgtaatattttggtggtggtctgtattttattttggatgactgtacacggactgttatacttaattatgcttaaattacttagactacgtactttgttaaattagttcaacgtagcaaaccgtttagaataatattttacgtaaccaaatttcgtagaaaatttttttccgtaaattaaaaacgaagttgataacaaaagaaatcaacgtaataagataagatgaggaaattaaacgaaatcgttatactacagacctatttcttaattgtttcacttttctatccaaaattcttgttgggggtaagcttatagttaaattatcctttaactatattgattcagattctaaaaaatgactcaggtcaggaatatacttacggagttgagagacatgaaaaacattatgaagattggagagatttggtggtaaagctatttgataagctactgtctctattcttttcagaatttgaaaaggaccaataaaacgaggactcaactttttgactttcattactcgtcctattcctgtaattagagtaactttaagaaaaacatgttctccttctagaaattctagaggttttcttcttttatcagcataatgtttttgtctattttgagctattaccaatttctccctaatcttcttgatttgctcagtggtttgagttaccaggtctggacccaagagacttgccttcctagactcataccaacataaaggagactgacattttctaccatacaaagcttcaaatggagccattccgatgctcgtatgataactattattataagaaaactttattaatggaaaatattttttcgaagaaccctgttggtctaacacacaagctcgcaacatgtcttctagggtttgtatggttctttttgtttgtccattcgtttggggatgataagcagtacttaagcataatttggttccaaatgctttttgtaatgcaccccaaaacctagaagtgaaacagggatctctatcaaaaattagggtggagggtacaccatgcaatctaactacttcatgtatacacaattgagctaatttctctaatggataagagatcttgataggtataaaatgagctgacttagtgagtctatctacaatgacccaaattaagtcgtggccagaaacactcttaggtaatcctaccacaaaatccatagatatactctcccatttctaatgaggaatttctaaaggttgcaaagtgccagaaggtttttgatgctctatttttaccttttgacacactaagcactttcccacaaactctgcaatgtcctttttcatgtcgggccaccaaaacattttcttcagatcttgattcatcttagtaactccaggatgcattgtgaaattacttttgtgagcttcattcaaaattttctctattaatccttccacttttaggtacacattcttttttgataagtccacagcccatcattattcacatcaaaatcctacaattttctttcttggacttgagttaaaatttgttgaaaatctaaatctctctattgtcctattctaatatgatttttgcaatcactagtgatctatatttgactcaaaatgatacttttagaattaattgaaaatcccaaattaagattcttgaaattttgtattaattccatttccttgatcatcatcctagatacatgctgagatttcctacttaatgcatcagctactacattttcctttcctcgataatattttaactcagagtcataatctgtaatgcccggtattttaagcatgtaattaagcctagatcaaggccatgattaaggatgatgaacatgcttaagagtatccagcgaaaaggctcgagaaagagagatactggtggttctggaatatggcgcgacctacgtgggatgtggcgcgacgcgcgtcatatgtgtaaatcagggcagatggctctgccatgtcacgcgagccacttgaagatccacgcgagtcgcgtggaaagtggtctggaaaaccagtttttctctggtttcccacgcggatcgcgtgggggtatggcgcgagtcgcgcggtgtctcggcaggttcacgcgagtcgcgtggatgttcacgtatctcgcgtggaagggccgagagtatggcgcgagtcgcgtggtttcgggcgcgagtcgcgtgggaaggtcggtgaagcttttataagaacgaaggtcgcgttttgaggggagaaaacatggttttcttcttcctctggaccctggcagccatgggagagctctccaagctcccatgaccttgttttgcgaccctaaaatccttcctgcaccgattatacctccttatatctgagtgagagcgagaatccttcctccctattccctaaaatcccaagttctgggaaaccttcagagaggttgagagaactcgagattgaggaggaacggcgactacccacggacactggagctacgaggaacgttccagaggtcgtctgtgtcgccattgaggtaagaaactcgagtttctccggttgatttttctgattgggggtcttgggtgaatagtgacccatctgtgatagggctggaattagctctgggtccagttgagagaagggtttagtatgatgtgaggaggaaggattagctttcaatttgtgatttggagactgttggttttggctctaggtgaggcatgtgtgacttggactgagtcacttgatctgagacatgccagagcctttgtgatgggcttgagatgcctgataggccatgtagacggtatctggtgagatagaccgtccaagccctgagaaacccggaggatttgggctgttagagctttaagctctctatgaatggcttgtggatgagtctagaatgactctgaggccatggttgatctgagatagaccactgagggtctatggaaaggcttgtgatggatgagccttataaaccttagaatagatgctcaggttgatgggaaggactgtggttcctttcccagaggcagtggatgtctgctcgatgagcttatgcatgttttgatgcttgtatggtctgtgatatatgtttgtctgccttgatagggtttgacaccgtgggtgtcagagaagcagaccaacagacgaggctatagctgtggggcacggcttgccaggtaagctcatcgttctggattttttccctgattatggtttgccactcaagtggagtgctgaatgcatgttatgcttaatatatttatatgtgctgtaagcctgaagggctgagaacggttcttggagtggaactcaggccgttctggaaatctgaatatctgatgaaccctaggatagacactgagacggtgtgaggttcagtgattctgatgagatgcagaccatgaggtggtctgtgatggaacctataggataccagactggtatcgggctagttgaggttccctagccagaggaagagtttgaggactcccaggaatagctgagattccttgggaggtgccactgctctccactgaagtcctaaggatggattgccctgtatggaggttcctccttaggcaagtgttgattcggaagtcctggagggctatttccaggccagatgataaatagatatgctgtatttctaagagagggtttcccgaaggggggaaactaaagcccagggcctctttgatgagccatgtctggtttttttaagtcctgagttgagggatctcctcaggcaatgtttgtatggtttcaagtcctgagtggagggatctcctcaggcgatgtatgtgtgttttagaggcggtgcctcttttgtgtggatagtgtccggagtatgacactgacaatagagtacctctgtgagacaggctgtgagagccaggatgaggtggaatacctctgatgctgagagcatccggttatggatccagatggctgggatgtatgatagtcaggatgatatcctaggctgtgttatgactgttttctgtattttatgcttgtaggtaaaccagggttagggacgatctcccagtaccctgagcttactgagacgtttgtctcaccctgtgtggggcttgtggttacaggtgcttcttgaggagaggagcgacctcagggcaggaggccctagtggacttgataggctggacgtgaggctgcagtagaagaccagggcagagcttcaagagtgaagttggtcttagatctctgtgtagttgtagggtatgtgtatacccatttcctgtacatattataatgtatgacccagctgtggtcttgtttttgagcatgtatgtgtataaatgatgatgatgtatataaatgtgtttcctcctgacctgtgtgtgtggttttatatttcatgcataatgtaatcaagataaacgattctatttgcttccgcaccgcgcttagttaactctgatagcgtgttatgaatatcattgatgataacatgccggagacgtccggggtgttacattaaatggtatcagagcggtttcttgatggaatcattatgtatggaatagtggttgcttgctgttgtgatctgatctgacatgagcatggcatgtgggtacactggatgtgagcctgatcaactcgctgtaagtgtacatgtgtaatgtcatgtcgagatccagaagccacagtagggcgatcagtgttcagtctgatccagtgaggggccgagatggcggccatgcagcaagagttggctgcatataggcaggttcaggaggacatgcagcggcagagggctgctgacagagaaaggtatgaggccttgatgaaggctcgtcaggagttgacagaggaggtctgagctaaaaggaggggtgacagaatgttccccacacctcctgagtatgagggcgaggaagtcgccatcaggttggtgggatccacctgagaggggaccagatgtcccatgttgtcacagagacctaagtgcagcctgagggcagatgcttatcggttgtaagcatgaccctccagcctaccatggtggttatgaccttgtgcctcagcaaagtagctgtaggctatggagaaggtctatgaggcgatgaaagtctagatcaccaggggttacggtatgtgacctacgtgctgcagggtgataccatgagtggtggaagaccacagcggcactgcagatgggccggggagagattcttacctggctaatgtttgaggcctgtttcttggatgagtagattcccagggatgctagagagcagaatcaggtagaggttgacagtctagtccagggagggacatgactgtggatgagtgtttggctaggttggatgaactggccaagtatgctcagggcagaagatccatgccagatgttaatgtcctcgtggctaagttccagaggggacttaaagaggatatagagatgatggtgacgggcagtggatcctgagtcagggactgcttggtgacatagtatcgccaagtgaatatggactcagtagacaccgagataagcagtttacttactcggtggggcaaagggtaggaagagacccagagatgctgacccagttgtgcagggcaaaggcgcggagctagttgtatgtttagttacagctctgaggcgcctgaggttgcccagtcgccgaggagagcggcagaggcctgagatatccagtgtgatgcttgtgaggagcctcactggggagtgagtcttacaggtcagctgatgtgttttgtatgtggccagtagagccactatgtgggatgtgtcctgaggaggacaatcacggagatagagtctccagaggtactagatgagatgtcagaggaattctgaccagagataaggtatggttatatacctagtacatatacatgggtagatgtatatgttagttctccagaggtgatggagagtaccacgcttcgaggaagcggtggccgctgagatagtttgagatggacctccctaggagaggagttttctcctagttggttttctctggttgaggagctcccagagaactgtgtacagaccaagaggatagaagttgaggagctccttctatacctcggaggtgccatagacgtgcgtccctgtgcaagggatagttcccgaggggacgacacgtatgttagtccagatcacacactggagtgtgggtcatgtttcatgctgtatgttttggctatgacattagttgtattgattttatatgtatctgcgttggatatatctgttggccaatagatagatacaggcgtcgaggatctccgccgtgtatcatgggcgttgaggatctccgcccagtggcatcgaggatctctgccacaccatgacaggtttgacgttgaggatctccgtcagtggcgttgaggatctccgccaggcattgaggatctctgccacctgtcatgtgattggccaatagattgatacaggcgttgaggatctccgtatcatgggcgttgaggatctccgcccagtggcatcgaggatctctgccacaccatgacaggtttgacgttgaggatctccgtcagtggcgttgaggatctccgccaggcattgaggatctctgccacctgtcatgtgattggccaatagattgatacaggcgttgaggatctccgtatcatgggcgttgaggatctccgcccagtggcatcgaggatctctgccacaccatgacaggtctgacgttgaggatctccgtcagtggcgttgaggatctccgccaggcattgaggatctctgccacctgtcatgtgttgagatttatgatgatgatatcatactgacgttgaggagctccgtcagggcgttgagtgatactccgccaggcattgagggttctctgccatgtgtattcgcgttgagggttctccgcgaggcgttgagtgatactccgccatgtattgagggttctttgccaggtgtgtgatgtgatattggcgttgaggtagctccgccatctatttgttatcagcgttgaggtagctccgctgggcgtttaggtaattccgccatgtgcttagagcagatgcctgctcaaatagataggagggccagagggccaggtcaggtgaccagtttgcttgagatgcgtcccagcagaggcttggacatgtgctgagatctcgagcaggatagcatgggagtgatccatgcgtgagaacagtctttgactgtgagctaagtgagcagctcagagatataggcctgtcgatgacaagggatcatctggtctatggttgagagggaccaagtgatggtgatcagagtagcgcagcggagatctgcgaggcccagccgcaggaggtggctgtgagggctatggtataccagcaagatgtctcttggaaagcacctagcttaggatgagctaagcctgatgagggtgcatagcgagagagagagctggtagatgccatccttctgaggtttagggatgggttggataatcatccaagggccactgtgatgtgtctggatcctgagagaaattcaggtggccagggatgaagtaagacatagctgtagaaacagcaagtgtatgacatgtcacttggttagtgacagtgatccgaagttacctctgggtatgaggtgttcttcggaaggtttggaacccagctgaggcctagtgtgacctaccattctcagataaaagatcagatggagcgggccatctagatcctagaggatgtgttgtgtgagcgtaccttggagcaaggtactggctgggttagtgatctgccttagatggagttccttgatcgtgaaagttcacatgttagagaaacatggcacctgatgaggcgccgtggaggccaagggtgcaggactcccattgatatggcagagatagaggcaaagacagcttcatgaacctgggatggtttgagagactcttgagcagatccagaggatcagagttatgtttgaacgctcagagtccgtaaaatgagatatgtaatcctagacacctaccctgacagttagtaagggtaaccagaggtgtctgaggctgtctttggtcacaggtgtaggatgggctttgagggagaggaggttgcctcccagttaccttgatggcataagagttgccatgtgttccaggtaatgatgtaatggaaacatcacgtgggaagcccgacaatgatcagatttgagagaatctgatagatcctacacgacctataagggaaaacaagtcctaggaaggactatatgttgggatttgggaattttgcggacaaaattcctaaaaggaggggtgtaatgtaatgcccggtattttaagcatgtaattaagcctagatcaaggccatgattaaggatgatgaacatgcttaagagtatccagcgaaaaggctcgagaaagagagatactggtggttctggaatatggcgcgacctacgtgggatgtggcgcgacgcgcgtcatatgtgtaaatcagggcagatggctctgccatgtcacgcgagccacttgaagatccacgcgagtcgcgtggaaagtggtctggaaaaccaatttttctctggtttcccacgcggatcgcgtgggggtatggcgcgagtcgcgcggtgtctcggcaggttcacgcgagtcgcgtggatgttcacgtatctcgcgtggaagggccgagagtatggcgcgagtcgcgtggtttcgggcgcgagtcgcgtgggaaggtcggtgaagcttttataagaacgaaggtcgcgttttgaggggagaaaagatggttttcttcttcctctggaccctggcagccatgggagagctctccaagctcccatgaccttgttttgcgaccctaaaatccttcctgcaccgattatacctccttatatctgagtgagagcgagaatccttcctccctattccctaaaaccccaagttctgggaaaccttcagagaggttgagagaactcgagattgaggaggaacggcgactacccacggacactggagctacgaggaacgttccagaggtcgtctgtgtcgccattgaggtaagaaactcgagtttctccggttgattttctgattgggggtcttgggtgaatagtgacccatctgtgatagggctggaattagctctgggtccagttgagagaagggtttagtatgatgtgaggaggaaggattagctttcaatttgtgatttggagactgttggttttggctctaggtgaggcatgtgtgacttggactgagtcacttgatctgagacatgccagagcctttgtgatgggcttgagatgcctgataggccatgtagacggtatctagtgagatagaccgtccaagccctgagaaacccggaggatttgggctgttagagctttaagctctctatgaatggcttgtggatgagtctagaatgactctgaggccatggttgatctgagatagaccactgagggtctatggaaaggcttgtgatggatgagccttataaaccttagaatagatgctcaggttgatgggaaggactgtggttcctttcccagaggcagtggatgtctgctcgatgagcttatgcatgttttgatgcttgtatggtctgtgatatatgtttgtctgccttgatagggtttgacaccgtgggtgtcagagaagcagaccaacagacgaggctatagctgtggggcacggcttgccaggtaagctcatcgttctggagtttttccctgattatggtttgccactcaagtggagtgctgaatgcatgttatgcttaatatatttatatgtgctgtaagcctgaagggctgagaacggttcttggagtggaactcaggccgttctggaaaatctgaatatctgatgaaccctaggatagacactgagacggtgtgaggttcagtgattctgatgagatgcagaccatgaggtggtctgtgatggaacctataggataccagactggtatcgggctagttgaggttccctagccagaggaagagtttgaggactcccaggaatagctgagattccttgggaggtgccactgctctccactgaagtcctaaggatggattgccctgtatggaggttcctccttaggcaagtgttgattcggaagtcctggagggctatttccaggccagatgataaatagatatgctgtatttctaagagagggcttcccgaggggggggaactaaagcccagggcctctctgatgagccatgtctggttttttttaagtcctgagttgagggatctcctcaggcaatgtttgtatggtttcaagtcctgagtggagggatctcctcaggcgatgtatgtgtgttttagaggcggtgcctcttttgtgtggatagtgtccggagtatgacactgacaatagagtacctctgtgagacaggctgtgagagccaggatgaggtggaatacctctgatgctgagagcatccggttatggatccagatggctgggatgtatgatagccaggatgatatcctaggctgtgttatgactattttctgtattttatgcttgtaggtaaaccagggttagggacgatctcccagtaccctgagcttactgagacgtttgtctcaccctgtgtggggcttgtggttacaggtgcttcttgaggagaggagcgacctcagggcaggaggccctagtggacttgataggctggacgtgaggctgcagtagaagaccagggcagagcttcaagagtgaagttggtcttagatctctgtgtagttgtagggtatgtgtatacccatttcctgtacatattataatgtatgacccagctgtggtcttgtttttgagcatgtatgtgtataaatgatgatgatgtatataaatgtgtttcctcctgacctgtgtgtgtggttttatatttcatgcataatgtaatcaagataaacgattctatttgcttccgcaccgcgcttagttaactctgatagcgtgttatgaatatcattgatgataacatgccggagacgtccggggtgttacataatccttaagaaattcaacccatcttcactgtctcatgttcaactctttttggtcaagaggtacttgagacttttatgatctaacgagacttcaaatcttactccgtataaataatgtctccagatctttaaggcaaaagctacagctgctaattctagatcatgggttgggtaattgacttcatggggtctcaactttttggatgcatatgctaccacattcccatattgcatcaacacacaacctagacctttctttgaagcttcatattacacttcaaatgcaccatgaggatctggcaatactaacattggagtactagttaacctctaccttaattctataaaactcctttcacattctggtgaccatacaaaaggcacatttttcctagtcaagcttgtcaaaggtaaagctatttgagaaaaccctttaataaatctcctataataaccaattaatcctagaaaactcctaatcttagttactgtggttggtctatcccaatttatgactgtttcaatcttactaggatcaactgaaattcgttctttagaaacataacctaaaaatttcacttccttagcctaaaattcacacttagataatttatcatacaacttcttttctctaagtgtcctcaatactattctacgatgattttcatgctctttttttttattttactaaacaaggatatcgtctataaagaccactacaaacttatctagataagatctaaatattctattcatataatccataaaaactgttggggcattggttaatccaaaagacatcactaaatactcataatgtccatatcgagtcctaaatgcagttttaggaatatcttcattcttaactctaatctgatggtatcctgacctaagatcaatcttggaaaatactgtttctcctctcaattggtccataagaacatctatcctaagtaatggttacttatttttaatagttatcttattaagctgtctatagtctacacaaagcctcattcccccatctttcttttttactaacaataccggagctccccagggtgaaacactaggtctaataaatttcttctccaacaactcctctatctgctttttcaattcttccaactctagaggggacatcctatagggtgccatggatattggttcagatctaggaattaggtcaatattttccctttctggaggtatccctggtatctcatctagatattctcttaccacgggtatattagagagttcatcagttgattcagttacattagctgataaaagcacatacccttgaatttcatttttattggaacaagaaacaatggagttcaaatacaaacattgagtttgactgttttctaaaatttctgaaggtaaaacaatggttttatttgaacaatccaacaatacatgattatctccaagccaatccatacccaaaattacactaagtccaatcaaaggaagacaaatcaaatttgcagaaaaatacatgttatcaatttgaaaatcacaattaagacaaatttgactagtagtaataggtttacctgtaggggtagaaactaaaagatcataaggtaactgagataaaggaaaccttaattgtataacactgtcataataaatgaaagagtgagtagcacctgaatcatacagtacaattaaaattttatctttaattctgcacttacccttaatgagattttcagattaagatgcctctgctacattcatgataaagacccttccaatctgttcaggatgtgcggtggcttggggtcttgcacttctacaattgttagcaaaatgccccatctttccacatcggcaacactaaatatcactttgacagttctgtgccaagtgtcctgtctttccgcatcgaaaataagtgttctgagctattgggcatggcctatctccatggatcttatgaaatttgtgacattccctgcctgaattttgctctgtctgaaacttcatttgctgaaacctattcttaaatttaaaaggttggggtcctaatttcttcctaaaattattacttgactctttcttttcaacaaatctccttttatactcttccattaccctacacttgtttatcagaactccaaactccctaatttataggggtcctactacttctaacatatcttcctacaatcccccttcaaatttcatgcacttccagtgctcatcaggcttatgctgataggtggaggaaaacttaattaactcttcaaatttagaaatatactcatacacactgtcattaccttgttgaagcctaagaaattctagttccttagcatatctcactgaaatgggaaaatacttcccatagaatgttgttttaaacacctcccatgtgatatctactccattacctgccaaaattttcctgtggctattccaccaatactcagcatcagactgcaacatatatgtagcataagctactttctgttgatcagaacaatccaatacagtaaatatcttttttgtttcactaatccactctttggccatatctggattaaaagttcctttaaatactagcgggttagattttctaaactcagcaaacttatgatattccaaatcagtcacttgccttctactattgtcttgattagagttattgttactactttgattattattatggttatcagttgtgccatcatttgagtagctgccgcagcctgttgacttgctgcaaccacttgttgatttgcagtagccgcctgctctcgcatagctgccaccatctcctgaaaaatatctatttcatctctgttgccaccaggttgtgttgcagatcttcctctcgttctcctactagccatgaattcctattcactttaacaaaaatactaaggtgatcaagctcaataccaattaaagtgcgtcagaattcaataaaacaagcacacatacacattcaatttgcacactcagagtacacaaaaaaaacattgtcagtcactaaaatttacacccgccccaacaacatattctttcctcaataacatggcatcatatcaatgtcctttgaagggtataaaaaaaacaataaatcccactcccacagccacatcgatgtggtgtagtgctctaaaataaaggacatttttactgtttttcttagactcaaactgaattgttgctattcaattccaaaacggaataatttcaagtaactacagaataatttcaagtaattccaaaattgagttcgtaaatcacaaggctaactttgatggttccgtgaatgaatggtttgcaaggatagatcataatggcgatgggaagctttcacgtgacaaaattcgaggttcagagttgccaccacagcaacagaacaaagatatattcaagtaactaagatattataatttctacaccagacccagatatattaaaattggatattctataaacgaaaaccttgtttttaggattttcaaaaacctaatccaaagcaaaagtctttcctatagaagagtaactaaatcactaaggatgaagcatattaggacgcagaaaacataaatgcatagcagaaaggcattaccttaggatgatgagtagcaaagtgaaaacaagaatgaagagtgactcagtgagcgtgaaaatgaggagcatagcagcggtggcgatgttcacattggaccggcacccgcaatgagaagcacgatggcgacgacgacgacgaaagcgatagtgacaggatcgaagacagggctttcagaaggtttaggcatgcgagtaatcgaatgagaatagtggcgtttgggttaatttataattattatcaacatcagtttttattaaaattgatgttaacatgagtacgttaacatcaatttttgaaaaaatcgatgttaacatagtcatgttatttacgaatatgccactgtgtttttgttgacatcgattttatccaaaatcgatgttaaatgcctattttctagtagtgcttgtagttattgactagctctcttcttcaattttattcattatatcagaagagtttgttgtgatagtgcctcagtacattgttgcatggcattaatctgtatgcactgttgtcttctacattacatcttcaggcaatccttaagctatgtgtagcttctgatatcaaccattgacttcaattatcgttagaaaatcatgcttctagttatatgtagcttttggtatctatactttgatatagagctcatgattgttcttctgcttctggtttcttgcttctgaagttggacaatctccaaatttaagaacccttcactgtaagtcagtgtttcacaccttttctccatgcatattgattaagtcttgtctctttgaaagcactcacagtaaatcatagtagcacaactctaaaggtcttagaatttatttcttaaaggtttgttgtcattaaaacatttagtttagaaagggttctacttcaacagttgttatgtggagtacttttcactctaccaattggagattgtcctcctaaagacatatactgcccaacgaacctaattttttttatgcttttaaattacaaaaatagatatacattatataagttatcaactatatataatataatttaaagtcatctataataatacataaaatataattttgtttagttaataagttgtataagattttattattaaaatttaatgcataaaatgttttgaaacttttactcattactatttcagattcttgtttatacgtaagatagtctttttaaattaactttgttaaaattcagttgagataaggagaaattaattttaaaaatcacatgaaaattgtcaaattagtgtgtgtctatctatctatctatctatctatatatatatatatatatatatannnnnnnnnnnnnnnnnnnnnnnnnnnnnnnnnnnnnnnnnnnnnnnnnnnnnnnnnnnnnnnnnnnnnnnnnnnnnnnnnnnnnnnnnnnnnnnnnnnnnnnnnnnnnnnnnnnnnnnnnnnnnnnnnnnnnnnnnnnnnnnnnnnnnnnnnnnnnnnnnnnnnnnnnnnnnnnnnnnnnnnnnnnnnnnnnnnnnnnnnnnnnnnnnnnnnnnnnnnnnnnnnnnnnnnnnnnnnnnnnnnnnnnnnnnnnnnnnnnnnnnnnnnnnnnnnnnnnnnnnnnnnnnnnnnnnnnnnnnnnnnnnnnnnnnnnnnnnnnnnnnnnnnnnnnnnnnnnnnnnnnnnnnnnnnnnnnnnnnnnnnnnnnnnnnnnnnnnnnnnnnnnnnnnnnnnnnnnnnnnnnnnnnnnnnnnnnnnnnnnnnnnnnnnnnnnnnnnnnnnnnnnnnnnnnnnnnnnnnnnnnnnnnnnnnnnnnnnnnnnnnnnnnnnnnnnnnnnnnnnnnnnnnnnnnnnnnnnnnnnnnnnnnnnnnnnnnnnnnnnnnnnnnnnnnnnnnnnnnnnnnnnnnnnnnnnnnnnnnnnnnnnnnnnnnnnnnnnnnnnnnnnnnnnnnnnnnnnnnnnnnnnnnnnnnnnnnnnnnnnnnnnnnnnnnnnnnnnnnnnnnnnnnnnnnnnnnnnnnnnnnnnnnnnnnnnnnnnnnnnnnnnnnnnnnnnnnnnnnnnnnnnnnnnnnnnnnnnnnnnnnnnnnnnnnnnnnnnnnnnnnnnnnnnnnnnnnnnnnnnnnnnnnnnnnnnnnnnnnnnnnnnnnnnnnnnnnnnnnnnnnnnnnnnnnnnnnnnnnnnnnnnnnnnnnnnnnnnnnnnnnnnnnnnnnnnnnnnnnnnnnnnnnnnnnnnnnnnnnnnnnnnnnnnnnnnnnnnnnnnnnnnnnnnnnnnnnnnnnnnnnnnnnnnnnnnnnnnnnnnnnnnnnnnnnnnnnnnnnnnnnnnnnnnnnnnnnnnnnnnnnnnnnnnnnnnnnnnnnnnnnnnnnnnnnnnnnnnnnnnnnnnnnnnnnnnnnnnnnnnnnnnnnnnnnnnnnnnnnnnnnnnnnnnnnnnnnnnnnnnnnnnnnnnnnnnnnnnnnnnnnnnnnnnnnnnnnnnnnnntatatatatagatagatagatagatagatagatagatagatagataggggattgctaatacacatactcttttttcagtatgagtgcattatcaactaacaccaaaacttttggaccaaaacccaatctcttgtctcatgactaatttattgcaaggatatattagtaatttaatattttaatttttaaaatgaataaaatattcaaagcattgctcataactcatttatctcccctttctcttgaaggcacttacagaccctcttcttctaacttttattatctcataacaccaatgatatgttggtcactaaaacttattttatcacaacaactggtatattttccatcaagtaatggtgtgccaagttaatagagtcaatgtaatggcaagaataaaatacaaaataaaaaaactcaaagaccaaaagtgaagaaaaaatttattagagatcaaatgcaaaattcaaaaaatttccaaggaccaaaaacctatttaagtctcgttttaatgtaaaacaaaattgtagtaaaaacaattcattaatattaaaaggcattgattagctttaaatgacacactttacatttaatatcattagaagcaaaataagcaactcaattaagttcaatgggtccatggaattgtttcactctatccctcacagattcccgtgtctcactccctcctttatgaatttaaattttcaaatttattttctctcaatttcccaattttgcccacttcccgcatgttccactaacactcccacttgtcaataaacaacaaatttgattttttaacttttcatttccccctacaattctcaaattttcccactcctgatgtcctactcccacacataaataaccctaaatcttagaaagataaaatatacatttgaatcacattttgactttcaaaattatttcttgtcaaggaaaatgtcatttgtaccctaaatatgcaaatgatacaaatattgattttgatatgcaaattgacatcattttcatataagggatacaaatgaaaacggagtcattttggcggggcgtactaaacccactacgtaccacaccaccatttttcttgaggaatatactataagtcaaaaagtattttaaatgtatatttggtttgaaacacaaatttttggttatacaatttaaataactcatctagcaagacaaatatacgttgaataacattttaactttattaaaacttcttatcattgacactgtcatttgtatcctaagtatgcaaatggtacaaatattgattttgacatgttaaatgaacataattttcatattagagatacaaaggataaattcttagagcatgagtattactaaaactgagaaatattttaaatatatatttttcatgtcatttacatgtaagggatacaaatgacaattttcttgagatggagtattattgaaatgaaaacgtattacatagtatatgttttctgtaaggtgggttttttaaccatggaatataaataactcactttgtaagatagatatacattgaaatacattcagtaaatatatcttgtcaagaaaattgtcactagtatcttaagtatgcaaatgatacaaatattaattttgatatgataaataaatttcatttgaatattaggaatacaaatgacaatttctttgaggatgagggtttagggtatatatgcgttattaggtgaatggataccgcgaaaaaatttaccaatgttttcataatcaaattaatagaactttttttaaaattgaaatttcacattttagagtagtgatatcgtagcgacgaggtgggtcattacaatctctgcctctctctttattgctatgaaacttagtttttcattcttgatttgcagtgaaatttcaaagaagcgagacatcagtagagtgttagtaacgggtcttagggtttcaggaaagaaaggcttagggttgtaatattttggcctttgggcctaaatactttttagttgtttttccttcttttagtgttttagtttattaagccactattttgagtctaatttagcttctcttttgctctggttttagataaataatatataataaatagactaaataatatcagtaataaaaatacaataaactaaataatagtaataaaataaaataaataatgaatcaccaacttaattactatatgattggaccatttttctttatcatagtgttgaaatgttgaattggtatgtaatttataagtattttattattatttttaatgaagtagattcttacaagtcgacaagtcgagtctacggagctcccatgagtctacatagactttcgagtttgataactttgtgtgtgcatgagtatgtataccaatatgttgttggtcagagtggaattggactttatcccttaaagcaaggtcttgtacgtgttcgagcctagaagatggaaaaaaaacgtgttgggaggggagactccactataggtggctaatcaagattccttgtgaagattaatcattgacctcggtggatacttcgaaccaataacatagttaacgaatgtatgtgtgtgtgtgtgtgtgtgtgtatctctatatatatatatatatatatatatgtatgtatgtatgtatgtatgtatgtatgtatgtatgtatgtatgtatgtatgtatgagaatggatcaaattacattggtgtaactttaacaactattacaccattcaataattttcaactgaataatgttttcttaaaactcacattagattgaaaatttctttcacatagatcacatatgcaaaatttcacattaatccaaaattatttgttatctcattcatatatattaaaattggtgtaatataaacattttaaaatatactaaaatgtgaatcatttgtttatcttcatgttattgtttaattttgacacaaataatcttggtaataagtagatataattcaatggttggataaataaacatcacatcctatataaagttataaaaatggtataatagttgtcaaagttacattgatataatttggtccctcctatgtgtgtgtggggtaggatgtcatttcagtgttacattctagcatggtattagtgtaaagtagaagtcaataaggataaaatgggaaagacaaaaaataaaaaataaaagataaagataaaagaagaaaaaatattaaccatctaatatatctaatggtaaaaagttagtttccttggtggtagacatgccttgttctcctaccctagccagatccgcaagacaaatatacatattccaaatccacccaactttaaaaaaaatgaagaaaacctaaatgcaatcaaaaccaaagtagatatttcaaccaattatctgtaattgcataataataaatattttcaaaaaataatttgtaatgatagataaagtgtttataaaagaaaattgtcttttcaaatatttgaacaaaaggtgactagacaaatatggaataaataattattgttacaaattaaaatcaataaaataattatgtgggttatccaagtttcagatttgttttagtacttatcctttggaattctatgttatccaagcttttggaatatgtaggaatttggggtggggacgagagtggttgtgagttcgatattgaagtcgtcgacagaggtgactacaatgtcactaccacgatggtgtcatttcagccttgcattctggtgcagtattagtctagaatataagtcaataaagataaaatgggtaagacaaaaaaaaaatgaaaaaagaaaaaatcttaaccatccattaaataactaatataatggtcagaaagtagggtcttttcccctttaaggggatttttttttttattaaccaattgggggcaagttttaaaaaaattctggattgggggtaagtcgtgccacgtctcacaactccatttttttaaaaaataaaaataaaaattggtcgttaaaatttggtcgctaattgaaagaagaaaaatgatatcatgaaaatgctataaaattatttattaataattttatttttcatattatttatgaattttgtttatgtattaaatgtgattttcaaaaactaattgtatataacatttatatcatatatgtgatttttttatcctcaataaattttcaaaacaaatattcactttaaaaaatataaaaaaaaaatacctatgttaataattttaacatttttgctatcataaacataccacaacaaaagttttaattttattacaattcaaaatatagttcatcaaatatttgtatatataaagtcatatattaattatacattacgttatatattttaatattatcatccaatttttacatctatatttctaataccatattgaattattttttctttattttctttatcaagtgtttgagacatgtgaagaataattgaagaattacatattttttcaacaattgacatacatttacaacactttgtaatagtaataattgttttattaacaacaacaatgttatcttatttttattagattgaattatttatttaatgttttatgtcaaaataaattattcaataaaaaacttcaagaaatttttgttagttatataattatacctcttatggtctcaaatatcatcagcaataaaaattctgcatttttaataaaaaataacagaatttaatgaagctaactaatttaatgagaatatccctaaaatatttgtcatttaataaggtcaaaaatgaaaatataatgaacacttatgcaaataaccaagaggggggtgaattgttggttttcctcatagttttaaaattttctttaaaaaaaatttataacaacggaagattttcaataagatcgtatctttcaaaaccaattcgaaaagcaattttcttcatcaatcaaataactcttgtgttgtaaccaagtttgtgtaatgaacaaattctatacttcaagaatataatgaaatacaaacttagatattaaaacacacaagatttatactagtttatctctcaaccccggagcctacatccaattttcttctaaccaaatctttttcagagttccactatcacaaatatctgttctttacaagcttacacctgatctctcttacccaccctaggtaaaattcaaaatctataccctatagacttttcaaaagaccaagaaccagagatcccctctctgttcttccctctagaaaaagccttaaagaatacaaatgttatatggaattacaacacaataacaaaacaaatatcaatcaaaaatcaagcttaaagttcaagaaagatatcaccttatattcctcagctaattcaatgatatgaatgattcaaacaatctgagaatatatgcaacaaatgaataatactctttcttgaagctttctttaaccactagcttgaacaaatcatcaatccttgagaattatgactaaaaacacaagtaactctccatgatcttcatcatatttgattttctcactaaactcagccttgggtacccttgagaactttagaaagtgtttattacaaggtttgcacgactatctttgtgtttcatttcataaaataacacaaaccagactattctatttataaaaaaacagatttaactaactataatcgattaattcgtcaatgcaatcgattattttaactattgtaatcaattattttaaccagataatcgattaaagtgctcatcaggaatctagaaatttatgacgaacaaaataatcgattaagtcatcttgtaatcgattattccagatgaactcagttttctaaagtacacatgtaatcgattaagttcctatttaatcgagaccatgtctaaaactcatcaaagcacatttaatcgtttacgaacatctggtaatcgattaaaccagatgaacatgctgtgtaaatttatgcagaagcttatataattgtttatttctcaagataattgattatcatagagactttctaattctgtgttaagcttatttaatcgattacgaaccactggtaatcgattaaaatgttcataaggcattttccagaaaacatacacatgttgtaatcgattatatcacctatgtaatcgattaaagcagtgagaaactgttttataaaatccctagttgcctttatgaatatctatcaaatttcttattaccacatgattaaacctaatcaaatgaatgtatgaatgcatgaattatcaaaagctaatgaggattataaggctttatcaactgaaccaagctttaacaaaaattacatatgtcttcaaatagattgggcatgtaaaacatcaaaactcatgtgcttcaaacttcttgattccttggcttcagcttcctcaattctaacaatctccccttttttgattttgagcatgccaaatatttaattgatgaaacatgcttcaatgtagagatgtgtaatctgaaaatttcacagcttttgcaaagatcaagcattatcataacttgattgatttaaaaacattcagacattcatttggtatttatagactaactccccctgagtctattatacaaactccccctgagtttcttagaatattctgttttaatcatttcaaatttatcatagcaattcatttcattcatttttcttattcttattcttatattctactccccctatttggcatatgaaattcaaaaatagacataagtatacaaatagaaaaggaaatataagcaatttcattaatcattaattgaatatatcaaacataaactaaaaattgaaacaaacataacaaaatacaaaacataacataaagcatacttaaacttagaccagaactaatccaaatccctagattcatctctgaaaatctaggattctatgttcttcaccctagtcttaagttcttctaatgaagagttaacttcatctctttgctcataatgtaaagaaaacaaggcatccatcttttgtatcatcaacgattcaaagtgtgagtattgaggtgcagatggtgcaggttcttcttgttgttcctcagcatctcctagttgatttccttcctcatcaccctcttctccttcttcttcagccaaaggaataggttggcctgccatttgccagccatatggtgtcttcattccaagcttggtgaggtgtttttccttaatttggttgttgctttcatttgtatgatccatgacttcattggatacatccacttgaaagtagtcaatgaatcttgaaactaaaattgcataaggaaaggggtagtttaccaatctctttgatttctgcatgatctcttgaagaataagaatccaattcagcttgattcctttcttcaatccataaacaaattggagatcatcatctgtagcttgtgcatggttggttgatcttgaagtgagaatgtaggtgatgatgtagtgtaggagtctatcttcatgagtcataggtcctgtgctcaattttaacctcagattcatgtgaggatcaatgagcatacctctgtatgtttccattctgttgtagcctttagctttttcatcaaatctcctttctccatcaaagaagatcccagcaacttcattccagatttctggagtaatctccatagctacttcattaacttgagtaagaattgttccatgcatagagattttggaacaagtgtagaagacttttaccaagtcaaggtaaaaagtccctttcatttcaacaaacttggttagaccttgctgttctaacatatgtggaaattgaaatccttgttcagtgaaccatcctaggttcaagaactttggagggcagagaagcttcgtagcattgaactgtaggtagttcattttatcagcttcattggtgaaccaatgatcaagcctacttactacaggatttgagggttgggcttaagcttttctcttagaagtttttatttttttggaggtagacattatgagaaggtaatggacacgaatttgaaaagtaagaaggaaaagaacttaaagagaaaatgaactcagaacaagaatatagagacagagagaaaaatagcaaggtttgagggtgtgaattgtaagtctcaaaaggtctctatttataggctatttggaagtaatgggcagttgagaattcgaaaatatagttgttgtgacctttaatcactaccattaaggcttagattctatcaaatcgagcttaattgcaattgggcagtttcaaaactgtcagatttttgcagtaaccactaaaataattgattatttcattatgtagtctattattttattcataatttcacttctaagaaatgatgtaatcgattaaaatacaggataatcgattatgtcagcacagatggcttatagaagacgaagtgtaatcgattataattggagataatcgataaaagcatagtgagacagatttcttagactagcatgactcaaataatcgattatttcgataaagtaatcgattattacagacttgttcaaaatttgaaaaacaccagagactcaatgtaatcgattaattcgtcgatttaatcaattattccagagtgaacttgatttttcaaaaactcgagttgtgaatattcgattatttcgatggtttaatcgatcacaacagctttgactagtattttaaaagcatcagatgagaaaataatcaattaagagtttatagtaatcgattatatcagctttaattcttaaaacaacatattttagcagcttctaacatgtattttaattctaatttgagttaatgtctttcacataatattcaagccattcattaacagagtaactagcataggaatgtcaatcaacatatactagattcatccaatattccaagcatatttcttaaagtaaagaatctatctttatccaaaggtttggtaaaaatatcagccaattgattgttactatcaacaaactcaattttgatgttacctttttgcacatgatctctgatgaagtgatgtcttatctctatgtgttttgtcctggaatgcatgattggattcttggagatattgatagcacttgtattatcacatagaagtggaatgtgttgaagttccacacctaaatcttggagttgttgcttcaaccataagctttgagcacaacaacttccagctgatatgtactcagcttcagctgttgacaaggctacacaagattgctttttgcaatgctaagaaattaaagagcttcctaatagatgacaagtaccacttgtgctctttctatccaatttgcatcctgcaaaatcagagtcagagtaacctattaagttgattgttgtaccttttggataccaaagtcccacttttggtgtagactttaggtactataagatccttttcactgcagtttgatgagactctttaggattgacttgatatctagcacacaagcaaacacttaacataatgtcaggtcaatttgctgtaagataaagcaatgatcctatcattcctctatatcttgactcatcaactatttttgtaacaccccgtaggcctccgacgtgttatcattaataatatcagattagcgcataaaacatcaataaaatagtttagcggaaacataggatcgttttcttgaaacattatgtatggaaacgcataaatatatgctattaacacacacatatacaaaacataaaccacgcccctgctgatccagtttatcaaaataacaaaataagacagataacagatctttaggcagagtaataacaaataaaacatacacatgtactcagggaaactatcatatacatatcatcaaagttctgtacagacatatacatcagagtccacaccacacatgccgtggtggtacaaaaaaatatcagccctccatgagggcatacagaaccatatatcaaaacaaaaacaaaatagagccttcaagctctccacgccgcttctccatcaagcagcctagtctcaactgggcctcctgccctgagactgatcttctcgtcctgatatattacctgaaatcatgtaagccccacatgggtgagataacatatctcagtaagctcagggtccttgggaaatcatccccaccctggcccacggattcacaacacacaaacaggtatatgcatcatacatggcccactggcctcatcatatctagtcaatatcataatctcaatcacatgacaggtggcagagctcctcaatgcctggcggagctcctcaacgccactgacggagctcctcaacgtcagacctgtcatggtgtggcagagctcctcaatgccactgggcggagctcctcaacgcccatgatacacggcggagctcctcaacgccggtatctatctattggccaacagatatctcaatcacaacacaaatgtcaaatgcagatgcataatctcaatacaaacaatgccaaagccaatgcatgcatcatgaatcatgaccaacaccccccaggagtgtggtgtgcaaccacagcgggaattcatccccagaaacactgaacttacctggtaaggtctcaatctgcggttccttcccaggtctgtggctcccgccaccaacagtctcagaatcaaagcctaatcaaggcacatgcaacctcatatcaaaataagcccttaggcatacaattcacagtgcacaacaaatcagaattcccctatcctagggttcaagccagctcagcctacactaggctgctctcagaccacacaaggtctctcaaggctaattacaagccatctgagtcatcacagacccaaaatacaacatatatataaggctctggtatctcagcagataacacaagtgaccattccacaggccacacagacagtgcagagccaaaatccaaagtcatcagaatcaaaaactgaaagctattccttcatctattcatcgttctaaacaaatttctcaacaggaccctgggctaattctagccccagctcatatgggtcactattcacagagacctcccaattcaaaattaatcggagaaacttgagtctcttacctcagtggcgactcaaaaggcctcagaacagcttccacaggctccggtgtccttctcccaccttgggttcgagcctagctcaagttctctgagcctttctctctgaggttcctctcctcactcaaatctggggttttaagcaaaagatgaaggatactagcttttcaatcggttaaaacttaattaaaggttgctagaaggtgtttaggttagtatctgaggtccctgaaagcttgggaggtcatccatggaggtctggaggtccaaggaagaagaaaggttggttttcccctcttcttctcgttcttggcctttaaatactggttctgccgacgttcccacgcgactcgcgccatatatggcgctactcgcgccacgttccagtacaaaacagactttctggagcacttatggcgctacccgcgccaatctcacgctactcgcgcgggatgacagaatccaatggcgcgactcgcgccacctctggcgcgacccgcgcgagactccagagaagaattggtttttcagggcacttgtcgcgcgaaccgcgcggcccttggcgccatccgcgccagactctctggtcacccacgctccccgcgccaagaccacgccctcagcgccacatcttaacggtatggcgcgacccgcgccacacctggcgcgacccgcgccgcacttaaaatcaggttttctaacctgaatccccgcgctatcgcgcggggttagggcgccaactaaagttatgtacttagggttatcacaattttccctttttcatctgaatctaggtaggtagaagtttccattggtgttgttgcagctttgcaattttccatgtcaaacttctttaacatttccgtgcaatattttgattggctaaggaaagttccattcttcatttgtttaacttgtagtcctagaaagaatgtgagctctgccatcatagacatttcaaactttttctgcatgctggctgaaaattctttacacaaagaatgattagtggaaccaaaaataatatcatcaacatagatttgtaccaagagtatatctttgtttcttctttttatgaacaaggttttgtccacttctcctcttgtgaatgattgatcaagtaagaacttgctcaacctctcataccaagaccttggagcttgtttcaatccatataatgtttttctcaatctgtacacatggttaggatattgatgatctacaaaaccaggaggctggtcaacatatatctctacatcaatataaccattaagaaatgcacatttcatatccatttgaaacaatttaaaattcaatatacatgcatatgcaagaagtaaccttatggcctctagtctagcaactgaagcataagttccatcataatcaatgccttcctcttggttgtaaccctttgcaaccaatttagctttgtttcttattatgatgccacattcatccagcttattcctaaaaacccacttagtgccaatagatgtgtgagtggaaggtctagggactagttcccaaacattattccttttaaattgatttaactcctcatgcatagcaattaaccaatgttcatctaataaggcttgttcaatattacttggttcaatttgtgatacaaaagccatagtgcaacaaagatttcttaaagaagacctagtagatactcctttagatacatcaccaattatgttgtccaatgataaatctcttgtggtcctccaatctttgtgtttaggtgtgactgcttcttgattggactctagttgtgcttcatcttcttctttcttactagcttcaataagatgttgtttttcctctttagtttctgcatcattgtcacttaaaacttcttctaaagaagggtaagattcatcacatacaatatgcacagattcttcaacacacaaggttctcttgttaaagatcctataagccttactttgcaaggaatatccaagaaagatggcttcatcatcttttgaatcaaacttgccaagattatctttgccattgtttaaaacaaagcatttacagctaaatgccttaaagtgagagatgtttggtttccttcctttatagagttcataaggggttttcttcaaaataggccttatgagaattctattcagggtataacaaactgtgctcatagcatctgcccaaaaatgcttaggtaattttgtttcatttagaagagtccttgctccttcttcaagtgatctatttttcctctccacaacaccattttgttgtggtgttctcggagctgaaaaattgtgattaattccaaaatcttcacaaaacttttcaaagtgttcattttggaattcaccaccatggtcactcctaattgaaacaatattacagcccttttcattttgaattaacttggttagtttcttaaaagctgtgaatgcttggcttttggatctaataaacaatgtccaagtgtatctagaatagtcatctactataacaagtccataataatttcctcctatgctcatggttcttgaaggaccaaataagtccatgtgaagcaattcaagaggtctagaagtagaaatcatgttcttactttggaaagaatttttagtttgcttccctcttcgacaagcttcacaaatttggtccttctcaaatttaagcttaggtagaccaattactaagttcttccttactaacttgttgagatgatgcatgttaatatgagatgttcttctatgccataaccatgtttcatttaccttactcattaagcaatcagttttatgtatgaatgcatggtcaatggacagaacatagatattacccttcattttgccaatatgtgcaactttaccatttttgccttcatgtatcaagcaagtcttattgttgaaggtgactttgaaacctttgtcacacaattaactaatgcttagtaaattgtgtttcagcccttcaacataaagcacatccttgatcttagtggttaagctgtctccaatgttgccttgcccaataattctactttttattgttgtccccataagtaacatatcctctttcttcaagtactacatctatgagcatggatatgtctctggtcatgtgtctagagcatccattgtctaagtaccatattgatgattttgctctaagacacatctgcacaaatcaaattaaaaagagaaatagggtccccaatttaagttgggtccaaaggggtagttgctttctttcttttctcaacccatatgcattcaccatttggaacataaaaaaaccttctagcaaagcacttatatgaagtatgaccttttaacatacaataattgcaagttggagattttgatgttctagcataagtaaatctatgatagacatttggttgattgtgttgcctttggtacttatgttttggaggtacaaacacaagcttactttgagttctagcaccatgtttatatcccaaaccataagtatcaccagcatatttttgaacacttagcatttcatctaagttacatttgcctttgtaatactttcttagcaaatcaaccaaataactattttcagtttgcaagctcatactttcttttcctttactcagcttgtactcatcaaattctttctgcaattcattgtatttatcaaccttagagttggctaaggagcatgtacacccattttccttgtaacttgaaagaagcttgttatgttcttcattcaatttacaaagttcttcttgcaattcaacaagcttggatacatgcaatcttaagtcactgttaagcttgttgtttgcttttgctagtttttgagcttcacaatgcatctcatgaaaaacatcaattgcattttcaaattcagaatttacctctgattctgtacttgatgtttcttcttcttcacaaatggtagatgtaaggcataggtgagcttcaatttctttttctgaagaggattcagaacttgtggattcatgtcctcccaagcaatataagtttttctaggctttccatccctttttgatctcttctcaacttgtggcttctttgttaatgagggacattctgactttatatgttcttgctttccacattcaaagcaagtaatggaggaggggttgttgttcttgtaggtgttgtcacttgttttcttttgttgtggttgccttttgtttttattcttcctcaaaaacttggtaaattttcttactattagattcatattctcatcatcatcatcttcacttgaatcatcttctctttcaatctttgatggtgcatcttttaatgctatactcttatgccttttatctgcatcttcactatgagttaattgagataattcaagttcatactctagaagcttaccaaacatagctgccattggcatctttgataaaccctttgattctttaatggttgtgactttaggctgccaatctcttgttaggcatttgaggatcttgatgttcatctcttcttcatcaaaagttttccctagcccaagcaagtgcttcactatgtgggtgatcctagtttgaagctgtgagatgttctcatcatctctcatcttgaacatttcatattcatgaatgagagtatgtttccttgatcttctcacatcatttgtaccttcatgcgtaacttcaagtagttcccacatttctttggcacttttacacctaacaatcctgaaaaattcatcggaagataatgcagaagttatcatattctttgccttgaaatcatattgaaccattttcttttctatttcagacaatcatcccattcttttggtattgatttgtcatcaacatttttggtaggaatgaaaggacctttctcaatacaattccaagcacccgggtcattcgattggatgaagatttgcatcctatttttccacaagttaaaatgttctccttcaaacaaaggtggtctattcaatgaagctccctccttgaatgttatttgattagtattcattatcaaagatttaagaagatcttgagcaaattacaagaaccagctctgataccaattgaaaatataatgaacacttatgcaaataaccaagaggagggtgaattggttttcctcagagtttaaaaattttctttaaaaaaatttataacaacgggagattttcaataagattgtatctttcaaaaccaattagaaaaacaattttcttcaccaatcaaatcactcttgtgctgtaaccaagtttgtgtaatgaacaaattctatgcttcaagaatataatgaaatacaaacttagatattaaaacacacaagatttatattggttcacctctcaaccccgaaggctacatctagttttcttctaaccaaatctttgtcagagttccactataacaaatatctgttctttacaagcttacaactgatctctcttacccaccctaggtaaaattcaaaatctataccctataaacttttcaaaagaccaagaaccagagatcccctctctgttcttccctctagaaaacctttctagaaaaagctttaaagaatacaaatgttatatggaattacagcacaataacaaaacaaatatcaatcaaaaatcaagcttaaagttcaagaaagatatcaccttatattcctcagctaattcaatgatatgaatgattcaaacaatctgagaatatatgcaacagatgaataatactctttcttgaagctttctttaaccactagcttgaacaaatcatcaatccttgagaattatgactaaaaacacaagtaactctccatgatcttcatcatatttgatttttctcactaaactcagccttgggtactcttgagaactttagaaagtgtttattacaaggtttgcacgagtatctttgtgtttcacttcataaaataacacaaaccaggctattctatttataaaaaaacagatttaactaattgtaatcgattaattcgtcaatgcaatcgattattttaactgttgtaatcgattattttaaccagataatcgattaaagtgttcatcaggaatctggaaatttatcacaaacaaaataatcgattaagtcatcttataatcgattatttcagatgaactcggttttctaaagtacacatgtaatcgattaagttcctatttaatcgattaacacagatcatgtctaaaatcaaagcacatttaatcgattacgaacatctggtaatcgattaaactagatgaacatgctgtgtaaatttatgcaaaagcttatataatcgattatttctcaagataatcgattatcacaaagactttctaattctatgttaaggttatttaatcgattacgaaccagtggtaattgattaaaatgttcataaggcattttccagaaaacacacacatgttgtaatcgattattttaaccagataatcgattaaagtgctcatcaggaatctagaaatttatgacgaacaaaataatcgattaattcatcttgtaatcgattattccagatgaactcagttttctaaagtacacatgtaatcgattaagttcctatttaatcgattaacacagaccatgtctaaaactcatcaaagcacatttaatcgtttacgaacatctggtaatcgattaaaccagatgaacatgctgtgtaaatttatgcagaagcttatataattgtttatttctcaagataattgattatcatagagactttctaattctgtgttaagcttatttaatcgattacgaaccactgataatcgattaaaatgttcataaggcattttccagaaaacacacacatgttgtaatcgattatatcacctatgtaatcgattaaagcattgagaaactgttttataaaatccctagttgcctttatgaatatctatcaagtttcttattaccacatgattaaatctaatcaaatgaatatacgaatgcatgaattatcaaaagctaatgaggattataaggctttatcaattgaaccaagctttaacaaaaattacatatgccatcaaatagattgggcatgtaaaacatcaaaactcatgtgcttcaaacttcttgattccttggcttcagcttcctcaattctaaccaaaaacttttattatgtatgatatcaagttccaataatgtataatttaggaaaaaatatatttttaattaaaaataaaacagtttaatgaaattaactaattttcttaataattaaaaaatattctttttttacttaaaatcgagacccgaggagtattattaacataaaatcaacctaaaactatactacatattgtttatcccatgcattgcacggtcaaaaactagttatgtttaattgtacttaagtgtctcaattacttgtaaatataaaactagttaaataccccatgccttacacgggtattaattttatgatttataattttttatattattataactttttttatttatttaactattatattttgattaataaaatgtatgttattattattatgttagtgtttgagataacatttaatttattattattattattataaatatttactgcaatttaataaaatcatgatagtaaattttttttaccataattataaaaaaaatgtattaatattaattaaatttaaattagaatcaaaatatttttatcttattaattaatttgaattagaaaatataactatttattagttagaatattctaatcatgattggttactataattagaataaaaaataatattagtgttattaattaattttaattacaacatataattatattattaattataatcttttaataattaaaaactatatataattataatttagtgagaattaatatgcatattaattataatcttttaacataaacatggaggccacgatgcgagaagtgtcggtcagggggtgagaaggtgcgcttgtcggagacagctagggtgacggacaatgggagagggagagcaccttaagggaggactgtacgtactagggcacgaaaatgagtttgtaactcaaattggagacaacgacggttttacaccaaaacgttgtcgttcttcaaattttttcaaaatttccaaggcggtcatagccaaaacgactttgaatacaccaaaacgaagactgttaaaccaaaactgtggtcgttttgctaaaacccactttgaaatgttgattttaattacaaaaatgtcaccaccctccaaacgacatcggtttcgcgacaatcgactttaaatggccgtcgtaaaatgcaccatttctagtagtaatggtgatgtcaaaatcttcttttatataataacttgcataatatctcataccatgaatgttgagtttataatttatgacttttttatattatatatttctataatatatttatccatgatttttaaatttatattgttagtatataggtatatatgtaaaaaatatataagataattatgaatattcatatatatatatatatatatatatatattcaaatagccttacattataaatgttttattgatttttttcctaaaaaaatgcatatgagattgtgaatgcagtagtcatcatttacctgtctcgctacataaatactcatcgtgtgctctctcgttgtttgcatggtacttgttaaagggatacatgtggattttttaaatatccaaggatatccacgtgtatgaatggatgtttttgcataaataaaaaatagttgaaaaatattttaacaaactattggtgcataagttaataccttagcagtttattttgcttgagattgatgcggggactcaagtatcattgtttaaataggcatttctgcatcggttaattgtgaaacaattaatatattttgagtgtcaatgatagtgaaaataactatttggaaataatcatttgaaaatatcagtccttccaatttaaatgtattaaatgtgtgccaaataatgcattccactattttatttttccctgagaaatatacatcacttgggagattgtacttgtggtgataggttctttgtttgataagttctcacattctttccaaattggccaagttagtaagttgcataaaatgagaatttgaccctttcaagtcgcttttcttatcttcagtacgagcaaattaaattttgaaacccttagctaaaataaaaacaccacactaggaatttgaaattacaagtcaatgggtgtcttacaggtgaattgataaatgtcatattttagttaaatttagaattataatattggcacttgtcttttgatttcagtgaatttgattagaaatttgccctaatcctagttgttttatagttagtacatatataaatatgttatttacattttgaaaaattaatccaatcaaatccagtgttttgataggttttaatggtatccgaagcatccaaagcaatcaagacaagcaaaaaggggcaaaaacatcaacataggaaaattctgcaagtaaattagcccaaaactcgcttgggctaaagacctttcttcaacatgaagtattaactcgcccaagcgagcaaaatatgaagaaaacactcgcctgggtgagtggaattcttcaggattaagttttaacttgcccaggcgagtgaaacaaggctaaatcactcgcctgggtgagtaggcctaagctggtcaccatttcctataaaaaaagccatgcaaatgacgaaatgttggatgtcttggaggagagagaacgtgaggatcagagttaggagcttagatagagtgagagaagtgagaaattagtaaggagactttgctggagaggatcggtgatgtcttccttcatcatttctttagttgattgtgtgctctccacaatgattgactagcttttcctaaggattggatgtaatcttcatacccttatgtatctcttttaatatttgttatatgcatgaatcttttctactccttattggtaatttcattatgttcttaatgcttgattctacttgatcactagtttcatgaaattggattctaaatttgactggaaagtactcttaggatttgaactgaatgattttactctttacgttacgttgctaggaatagagcataacattttgattgcaaacaatatgagtttatgattataatgttgggatatttattctatatgcgaggattgatatttagtaaatatccttaggattctctaatgtgagggatcaatttggggtgatttaatgtttgtatcaataaggatagaaaatgatttatacatggtaatgttaatttaatactaagggtatgaacgatgaaatccaatcctacacttttcttgaattaattaaactcactttattagttttcataatttttcataattttgacgcactaaatctgttatttctgtattttctttatatccgtattttctgttatttcacaaacacatgaaattccgcttatattcattgtacataactattgaactgttaaattttatttggattaactgagtaactcaagtccttgtggagacaatcttttataagttttgtaacctgcaacgacaattggtacacttgccaagagtctaacaagtttctggtaccgttgtcggggacttgagttgcttactcagtttttttaggtttaatttttcagtttagtaggactttttcttattttactttggttcttgtataaattttcttttgttatattttaaccttggtgcttacgggatattttagtttgttctttttcctttattcaaggttagttttctgcatataaacctttgtttgatccaaaaattaccaaaacaaaaaggaaaaacaggaagaaaaagaaacaaaaagccaataagtcacccgtggaaactttgtctatcaattctccttcatcagaaaagccacccgtacttgaccatatggttgatcaagggggagaagaaaatagaccaccaaggaggactcttgatgactatgcttaccaacaaggacctaagcattacaataacattgtcattcctcctttcaacaataaaattgtagaactgaagccatcactcctcagtctaactggcttgccatcactcctcagtctaattggcttacatccctttgctggaatggatcatgaggatccatacacacacttgtctactttcatgaagctatgcagtaccatgggagcttctgacgaagatgttgaagctgtttatctcagagctttccaattttctttgataggtaaagcaaagacatggctccaatcacatccaaacaaaagtcttagcacttgggaagaagtggaggaaaaatttattgcaagattctttcctccatctagattcataagtgcaaaattagcaattgctactttttcctaagggtttgatgaacctgtatgtgaaacatgggagagattcaaatccttactgcgaaggtgcccaaaccataattttgatgatgtagcacaactacatattttctatagtggtttgagacctcagacaaagatgattcttgatgcctcagctggaggtactatgatgttaaagagcctggaggcagcaattgtaatcattgactccatagcagctagtgattacgagtctcaccatgatagatctccgattcaaagaaaaggtataacggagctagatactcataatgcaattctagctcagaataaactcttgactcaacaattagaggccttaacaaaacaaatatgccaactccctcaacaatttcagcatggagaatcacataaaacataccaagctcgtcaagttcattaagttctaagatgtgatttctgtggtggtgaccatcagaatggtcgctatccaacacctggtgaatgccaataggaagaggagactcattatttgcagaatcaaactaaacctcaacagaattttcaaggaaattaccaaggctactgaggtggtccaagttcaaatcagccttatggctggaggcagcaaaatgataatgcatattatggtcccactaactcttcttttataggtccctctaacaactcttatgcaggttcttcaaataggggtccaccacaacaacaataagaagcccaacatgatagaatataaaaaatggaagataatcttactcagtttatgcatatgtctatcacaaatcagaaaaacattgaggcttccattaaaaatcttgaagttcaggttggacaacttgcaaaacaactgtctgagcatagcagttgacctttttcaacaaacacacaggttaacccaaaggaaccaaggaagtgttttagagtggatgtcttggatgatgtattctgattccaagaggttgattcaaagaaaagattgttcagaaaaaatattgactagagcgtttgaggagattagtgaatgtgaagaaaatgagagttcaaattaactccatcagctagatgctttcaaggaaattccttaccagcaatctttctttgaagaattgttaaaggaaaagaaaaatcaagaatcaataatgaaggtaaacacaatacctccacattttaaaaatgtttttcatccaggtaatttacaggaaccaattacaagtaattcaagtctttctgaagaagaaaagaaactggtgaaaattttgaaggaaaacaaagaagccaatggctcttcactattgtccaattgctagaagcctgagccataacaaaggcgtccaactaaaaagacgttaaagaagcgctcctaggaggcaacccagtgttttctaaactttctttaatttatattatttgaattttatgtcttatgtatcttaattatatttcttaactttacttttgaatttgttgtcttatgtttttgaatatatcatctgttttgttagagctaccattgcagggcttggggacaaacctattttttagagtagatgaggatatggtagatcctgttgattatctcaatggaggagacaaagctcctcaaccataatcttcaaaaaatttgtgacatagtctttatgtttctctactgctttgtattaaatatagtactttatttccttatttactttttgcttagataattgcacgcacttatgattctttttggtattgcgcacttggattgtgtacacagaggattccctctttttggaagtacacattcttgattaaattttgttttattaacatagttgtagaataggtataaatctttttgggacttaaaagataatttttttttaaaacataacatgttttggaaagaatcaacagatagtagttttttgaaaattgcttttgaaattaggtcagaacacaacaaaattatttttggaaactttgagaatgaaaaacaaggaatggttttccaaataccaaatgaaggcagatatacttgcatggagctaataaagaacatctttttgaaacactgatttgatttgaacatgaaaataggccttatgcttaagtgactatgagtaccctcacagaaattacattgagtgtcctcactgatatgttctatagttgattttgcataaatttctaattgtcataacatatgatgcatggatatgatttaggccatctttcttcttgaacagtttaaagccactagccaaaaagttatcccaatatacaatgatttaccatttgctagcccttttgagccagagcacttatgattttgttcgaatattgacctaggataagaatttcctaccttaccttaggttaggagagcaaaaggtattttgttggaaacttttatcatttggatggctaaagtgatgaaaaatactttgttttaaatgtggctaaagctatagaaaagaaaagagaaagaaaaaggaagataaagaaaaaaggaaacaaattccttgtgaattttttttaaatatgttctaaattgtacaaagtatgtaagttgggtgactgggaggttggtataagaaacattgataacttggtagaaaaagaaaagaaataggaaatgatgatagcttgtcttatctatgtttgctctcgtattcttagggtaactttgaatatccaaaaaaaactaagatttctttcaaagcgaggtgttaggaatttacggcaagcgtaccgtgttatcgttgcaagttacaaaatttataaagttcgtctccacagggatttgagttcactttgattagtttaaatatttatcagtttaatagtctatgtacaaatgtttaaagtgaaggttcatttttttgaggatgtaacgtaaaataaagataaaaactattaagataaataaacaagtttaagtcaaggaaagcgtaggactggatttcgtcttacttacccctttcagttaattttacctatgcattgtctttctattcttattgttgcacacatttaagtaaccctaattcgattcctcgcatattaaggtcctaaggatattttactaaatatcgattcctcgcatatttaattaaataccctagcattaagattctattcacgtgtttaatacgatcaaaacgttatgccctattcctagcaacgtaacgtgatgagtgaattcattacgttcaaaccctaaatttactttccagtcgcctttagggtcaagttcatgaaactagcgatcacttagaatcaagcattaaacatggaatgaaatcaccaataagaaatagaataatgcatagatagaaattaaaagatcatagggataagaagaatacgtccaatcctagagaagcttaggcgagcatcggaagaacttccttaagagaatcactgatgaagtagcttgtcatcgatcctcttttcggcagagtctccactacaaaaactcactttctcacttccctaactctctactatcaactaagaaggattcctaagcctaaaatatgaatgaagaagctaaaatggtgcctaggaacttgccatcactcaaaaatttgtgggctatatatagtttttgcctcctgcctgctttgctcgcccaggcgaccaattccttcacattttgcttgcctgggcgagcttaagtatatctccttggaacttgcatcttgcctgggcgaccaaattggcctaagggagctcgcctgggcgagcttaaatcttagtgctgaagatttctttgggctttgatggtgttgggcctggattgcttgtgaaacttcaatttttactttgatcacccctttttcttggctttatatgctcgaaactttcagaatcttcaaacctatcaaaatacaccattaatttggacgaatcttctcaaaacatgaaatcataacttgactacatacaactacaatttaactaggtttttagggtaatttcatgaataattttaatcaagacaacggataagtgccttttaaaagtcctatttttactaaaatgtggcacttatcacgaggtcgaggcccaaccctaaaaaaaagtcctaaagatccatgataaatatgtactttgatttcatgggaaatgaaccgcaaaactgatctataacatatcagtgttggaattgagaataaacacttacctgtgagagaattaaacaccttttgagaggttttcctctgtttgaatcaatcaagtgttttctttgatgttctttataaacgatatgtaaatttatcttaatttcatttggtttggtgaattccatctttggtgtgttccatttctcatagttgactacttgaaaaatgtgttctaatcatttttggaaagttgattctttacaaagcatgttcatatttaaacattttcttttttagttttccttacttttcttgaggacaagcaagactctaggttagggggagttgataaatgccatattttagttaaattcatgattataatattggcacttgtcttttgattttagtgaatttgattataaatttgccctaatcctagttgttttatagttagtacatatataaatatgttatttacattttggaagatcagtccaatcaaatccagtgttttgataggtttcaatggtatccgaagcatctaaagcaatcaagacaagcaaaaaggggcaaaaacatcaacataggaaaattctacaagtaaattagcctagaactcgcatgggctaaatacttttctttaacatgaagtattaactcgcccaggcgagcaaaatatgaagaaaacactcgcctgggctagtggaattcttcaggattaagttttaactcccccaggcgagtgaacaaggctaaatcactcgcctgggtgagtaggcctaagctggtcaccatttcctataaaaaaagtcatgcaaatgacaaaatgttggatgtcttggaggagagagaacgcgaggatcagagttaggagcttagatagagtgagagaagtgagaaattagtgaggagactctgccggagaggatcggtgatgtcttcgttcatcatttctttagttgattgtgtgctctccacaatgattggctagcttctcctaaggattggatgtaatcttcatacccttatgtatctcttttaatatttgttatatgcatgaatattttctactcattattggtaatttcattatgttcttaatgtttgattatacttgatcactagtttcataaaattggattctaaatttgactggaaagtactcttaggagttgaactgaatgattttctttacattacgttgctaggaatagagtataatgttttgattgcaaacaacacgagtttatgattataatgttgggatatttattttatatgcgagggatcgatatttagtaaatatccttaggattctcgaatgcaagggatcaatctggggtgatttaatgtgtgcatcaataggatagaaaatgatttatacatggtaatgttaatttaatactaagggtatgaacgatgaaatctaattctacacttttcttgaattaattaaactcactttattagtttccataatttttcgtaattccgacacactaaatccgttatttctgtattttctttatatccgtttttctgttacttcacaaacacatgaaattccgcttatcttcattgtacataaatattgaactgttaaattttatttggattaacttagtaactcaaatccttgtgaagatgatcttttataaattctgtaagctacaacaacaattgatacacttgtcaagagtctaacatgaaaccattaagaaaaagtcataagaggcaaacttataattccgattgttctcatataattcgaaccaagaaaatctcctcgacaccctgtaacaccctgaaatttcaataactgcaaatgtatggtcaaaatgtttcttacacaactatttgatttgagtgttaggttatgtgagatttgattagtctatatttaaattatttgggtgaaatattaattagagatattagaaaaatgtttgtagagaaatgaccatattaccttcccttgaaatagaaattacgaaaatgcccttgaggtaaaaatgatgataatgcccttggatattttttgttagatattttaatgtggaagttacaaaaataccgttgagtcaaaattacacaaatacccttagatattttgttgagatattttcgaatgaaaattacaatcataccccttaggtaaatgacaaattaccatagtacctttgaggctagaattatcaagacacccttagatattttgtgaaagcttgatgaaattacagagtacccttggatggcaaattaccaaaatacttagtgacaagaagtctcagaataggatttctatgaacttcatacggtagtaactttgaaattttattcaggagaattcaagcatcagaaaaatatggaaaaatgataaatagaatctgtggaattttctcttaattgtaggatgaatagacttattcaataagatggtttagtaattttgatggttagaagcagaacggaccaatcagaattaagataagagcagtcttgtatgtaaggtctgtgtagcactctgtatagactgcttgtgagcaatttatactgtaattgaagtcagtttctggaaaactctagagttctattatttaatattatcctttaggtagaagagttcaaattgaactttacttcctcttaaggaatgccaagtgtaaagtcatgttggaattgaattcttcttcttcatgaaaggtgacatatggacacaaggagaaccacacaattttcttctctttaaggaaaataaaacatgatatagaaagagtaaaggaagataaaaatcttccccttggctaaagagaatacacatgaagaagagaagaaaaagggctaagaagtcatcatgctttacaaaatatttacacaagataacatgaaaggaagaaaatcttctcgtccttccttgtaggccacgtgaaaatggagaaagaaggagaagcttcatgacttagacaaatggagggacacttgtaaagaaggcatcatgacttaggagatttttttgcataaaaagtaaaagatatttaaaagattaattatgagtttagttaggatggaatgaaataggaagaaactaagttatgatgaaactagatgagagtaactagctagaaagggtagaaatgtccttgaatattttattattttccaaactctatataaagggagaaaggccttaagtggaagtcacattcaagactccattcttccacctattccacgtgaaacctctccttcatttcactttcatcctttcattttcaaagcctaaatcaagtaggaaaaagaccccaccttcttgaagaaatcacgtgtaaagctagcaactctaggaagagaaagacaagcttattaagaggttataaggtatgtatggggaagttttatgataaagatagtttaagtgttgtttgtgtttgaataagtgcttgaagttctgtgtagtatgacttgtatctgagaaattgttggactcgagttatagttatatgattgagtgcttgaatgaagtttcatgtgttgttgagtgtttctatacatgggtgatatgttgtgtacttgaataacaagttgagttctatacttgatttatgttgaatttttgaataaagtatatgagatagtgattgaaaactgatgttgaaaataaaatgactgagttatgtataagtctcatgtgtctcataagaattgcctcagagtgaaggtgtatataaaagttgcctcagagtggaggtgtgcctcagagcggagatgtgtcagatagctacaggaattgagtctgtgcattcagacaagagaagtctgagctgggggtgactcttgcggtggggaatcacgtcacccatgatgatcacatgaagtgtgggtgagaacctgtgcaacaccgggggaccctgactggtcgaatcagttctggaccactgggatggggctatcttgacagttggtaccaaataataagagtttaagagaatcatgcatcatgataagagtctaagagaattatacatcatatagaaattttgaggatgttgttataaatatctgtatattgaatatattttgttgcttaaattatgtttatcataaacttaccctatattttgtgtctgtggttgacacctgctatgaccttgattttattcgggcgagcagatgaacagcgaagagagactattagctgtctacaaaaagaggattttgtttgaagatgatatgtttgaagatgtattcttttgttacagagtgttttgaattagttgtactatgtgataaaaccagtattagtttgtaatcttattatatatatatatatatatatatatatatattactttagatttataaatattactcagtaatgaaattttcttggagtatcagttattggcaaaattttattatattcaattgggtactcttaagtaagttgaaaagaattttcattcaaaatcaataataacaagattgtaagttgaggtgttacacacccaaacttataatacgcgcgaaagaattgggaacccaaaagtgagaaaaacactgcacatagaccttctatttgatctaagggctgctattcaatcctctcgcctctcacaataaaacactcctctaacttgatatgcccccaagagaaagtgtaaaaaggagatagagtacaaagtgaaaaaataaaaataaagcttcaattactgtctcacactcgtggttacgactagacaaatttaagatatctattgataataaataataaaaaatataattataactttttatgtatttaactattatattttgattaataaaattttatgttattattattatgttagtattttaaaaacatttagtttcttttattattattattattattattattattattattattataataaatatttaatacaatttaataaaatcatgatagtaatattttttaccataattataaaaaaatgtattagaaccaaaatatatttgtgttattaattaatttgaattagaaaatataattatttattagttagaatattctaaatcatgattggttactataattagaataattaccttaactagaataaaaatatatattagtgttattaattaattttaattataacatataattatattattaattattatcttctaataattaaagactatataatataatttagtgagaataaatatggtgatgtcacgtgacatatgcgcacgtaagaaatcttcttttatataataataatttataataacaataataataatatattattataactttttatgtatttaactattatattttgttcaatggaaatgtatattatttttagtattttagataagatttaatttgtttttttttattataataagtatttactacaatttttgtagtaataaaatcatgatagtaaataattttaccataattaaaaaatgtattagtgtgttaaatttaaattagaattaaaatatatttgtgttattaattaatttgaattaaaaatataattatttattagttagaatattttgatcataattggttactataatagagggctagtcctagtatagccgtaaaattgtgtcttagtgacttgttggtcatgggcttaaatccagaaacaacatctttacatatgcaagggtaaggctgcgtatagcaaaaccttcttttatatagtaccactaatctactatatctactatctactattatatctataaaataaaatttgattctatgggatgaggtaatgctgtaatttctataatgtttgattaagtgttttaattagattcgaaaagtaattgaatttaatttaagcatttgtaattaattatgaggtgatgatttgtaatatttgtatatatgattacgattacatatgtgaaaacctttttttaggtgtgaaataataagttttagaggtttttgggccgagatgagtaggccttaagtgatagtcggatagggatgagatgggtgagtttagaaagtgaaggggtgtgattagaaggaattggaagagtcatagactcaacataaagggattcaaatttaaattacactcaaaacactctcatttcactatattctttctctccaagacactcctccattgaagagcttgaccttgaatttctttgctcaagggacctttaaaagtgctttactcgagtttgaaggctagttcattagttaggaactctcttcttttctctctcatctttcattgtcattttctctccataaacacttttgaaagattataaaagtgttcattttcatagttttgatgtgatttcggttgatttttgaagtttgagttgtatggatggtgtggagttgttgtgtgagtgggaaaaaacatacatcttggacctaaactcctcctttgttccttcattcttctcaaagctagttcattgattttggataggtaaaagaagcttaaaatctttaatcaaagctattttgatctttaaaaaaatcctaaaaaaatatgtatctttaatcaaaagaattaaaaaaaaacaacacaatatacctatatgaaaaatacttaataatatgagatataagatatacgtgcaatatacttgtcaaatattagtattaagaatatacttgcataatacctagtgccttgcacaagtacaagtcgattttataatctataattttttatattattattttataaaaatttaattctttatattttgtataagaacatattactgatattagtatatatgtttgtaaatattttaaaaatatatattaaaatcattatatttaaataatttagtattcacatatattatatcattttaattatatataattaaatatatacgtaattttaataagaaatatgaatgacatatatttaatattatactttctaattattagttttattttaaaaatatatttctaccatgaaaatatgaagtgactatgatataaaaagaatgaatttattaacattaattattaaaaagagagatttgtgggttctttttactgaagaattatattgtgagtaattaaagttagagattatactaaaaaagttgtaaatctaaagataagataatgtttatataataatattcttaattttatagaaataattaagttctttaagtattttatttaatttaatttcggatcgtgagcatgaaaaattaaacttgactaacacatactcaatatatttttattgggatttggataaaaccaataaagaagtattcaattaacaatatagacacttattaaaattagtgtatatgagtttattgatccctattttaagtgagcacaattttatattaaaatttattgatgagtcactatttattattatttactcatctttctgtactcattttaatccctagttgtgtttaaatgtctatattttgcactgtttctcatttaggacttaattggaccgataattcagattttaattaatttggattattttaagtttaattattctaatttgattttcagggcagattaataattaattgggcttggaattaattcatggacttgaagattgggatgccgggcgtcagcattaatttcagaatattttattttcgttttaattgtattttcgtttttgggccaaaactgttaaaaaagcccatttttcgtttgtgagacagtctctataaaattgggaactgtgcccatgcagaagggggggctcagctatttttttcgttttagggttttagagcattttcgttttctctgcttcttctccttagggtttttcgtttctgctgagcactctgtgactgaataatcgtttctgtttgaattttaatttgggaatacagtttcatttctgcttcttctaatttcgctttcagttttctgcttcttcaatttcgttctctgtttattgcatttttgttttctgtttgaatttgtttaatgttcagtttcgttcccatttatgtttctgttgctattttcgaattaatggaaggctaaaccctagggttggaccctaaacagattgcagacctttaatggaggttctctgtgttgcaattcgtattctgctttgttcttctttgtttgggtttctgtctgcaattcgtatcatgcttaatgattctgagttgataatctcagtttgcttaattctgagagcgtgccctaacgaggttcacgtttgcttaattcgtgtaatgacgttttaggttaatcttcgcttagttgattaacctggactgataagaattaagtagaacagattaactttcgtgaaccgaggaatttagaggcgcaatctgtttcaagggtttgactcgtttttaattactgcaattagttgttaattcctgttttgaattagaattcctgcattgtgacaaaaaaaaaaacttccccccttgcatgtttaatcccttgaacatagacaattggtccttgagagacgacctaggagtcacttcctagtactacacttaatctatattaatttggttgtgtacgaccgcgatcatttattaaattaaaaatttgaatgatttacattcaaaatatttgttatttttaattgattatcttgtttgtataaattctataatataattagtattgtgaaaaaataatttaattataatattttgggaatgaatcattttgatgatttgatttaagctaaagtacttttttcattacacaactcaactcataattcaaaaagaaaaataaataaaaacataaaaaagtaaatcgaaatattaaaacattaaattatatcatacctattccagatatctatagctgtcagtacctattaaataaaaaataaaacgtaaaataaattaacaaaaaatatcaaagttaaaagtgtcaaaactcttcacaaagaaaacgacaatagaaatagaaaagatgcaaaatttcatataattttaaatttattacatacccataaatttctctcatgttttcctttcaacatgtcaactttgacaaacactaaaaagtgaggtgtacttatcaaaatttagagtagactgacattaaggttgattgtcgtgagttgggctccaccatctcctatgtcggattggcaggtgccctccactagaggagcgagaggaggttacctgcaaaagggactcttactgtaatatcctgaatttcaaacatgtaattaaacttggattaagcatgaattaagcttaggattaagattaggcttaatgaaacatgattatgctcgataatttctagagaggtagcttaaaagagtgagaaaactgtgtctggcctgcggcgcgacccgcgtggtgagtggcgcgatccgcgccatatgtataaaatatgtcattgctgtctggcatcccgcgcgagtagcgtgggaacggcgcgagtagcgtgggatggccgagagtatggcgcgagtagcgtgggaatggcgcgagtagcgtgggaagtgccctagaaaaccatgtttcctctggagctccacgcgagtagcgcggatgtccgcgcgagtagcgtggattggcagtgctgcggcgcgagtagcgtgggaaactggcgcgagccgcgtgggaacgacggaaatgtttttataaaggccatttcaggctgaagaagagagagagaaaagagggaagagagagagggaagccattgatgatcctttgagcttcataactccttcattgttcatctaaacacctccgacccaactgagaaagtgatcaaagccccgaaaggagagtaaaaccccgatcgatttctgagattagctgagagaatgtgagattggatttccctgagagaacccctgagagctcggagtgtaaaggcgagggaagccttgattgagcgatctatcctagggaaagtgattccctggtgattctgagcgtcgcagaggtaagaaactcgagctctaactgttggttttatggattggattttgtgattttggggtaatcttgaggggtgtttttggaggtgttagagccgtcattaggctcggactctgtagagtcttatgctcagaggacggttctgaagggtttagagccttgaatcatcattactgatgaagtttgattttggctctgagtcagtctgagcagagataaaaggttgactaattgactagtctgaaccttagagcagttgacaaagttgctcatgagactgtataggtgagtttgatcggttgaaactgaccattatgagaggtcggatttaggccattgtaagcagagatatgcttggccatagttgatcagagcttgtgttgagactctgtagccttgtgtaggctgagagggatcctgttgaggatcagataatcacttgcacagtgattgttatgtggttatagaaaggatgatagttccctttcgtttgaacggtctagaaccgtatctgatactacatatgcttgttcttgtgtaggacgtgagcctgatagctcaggtggtgttgaccacgggaccgggagagccggtgacttgtctagagcaggtaagctcttggttcttgtttgtgtaacctttgctgtgttccaccataaacccagtggggttatggttctgttatgtatgtatgttagcagaggaatgatggataatgctatgattgcttgatgagtgtgatttgaaccctgtgagagggtatttaatgtttgatatgtgagtggaacccagaggtgggtgatgttacatgtggccatgagatgtgtattgatgatttaatgtgtattgatgatttgatccctgagaaagggaattgatgtgtatttgattcctgaaaaagggaaattgatatgtatgaacatgtagaatggtagcatgtctgattgattatgagacttgaatatgcatgtatgtagatactgtatgctgatgttccgatccctatgagagggaaattgacatgtattgataggctatgcttgaaatgtgagctgaaccctgtgataggggattgatatgcatggcttggttgtgattgaattgtggtaggtctgggtgaatgtgaaacctgactatgtatgctatgattgaatagtatcctattgtagtaggatagacgacttgagattgagtaagacctggtgtaagatgagcctgtgatatggaggcagcctcctacgtggagatgatcccatatacacagatgtagccttcccaggcaattgtattgtgatagaggatgagatggcccgtgatacatagaggagccttgtgatcagagatgtgcctatgtacacagaggtagcctcaccaaaaggagatgtaccggatatatagttgatgcctcgtgatcagagatgtacctatatatctagatgaagcctccgctagggattcatgcaagagatgtgccgagtatatcgaggtagcctccccgtaaggagatggccttatatacttagatgtagcctctgcatgatggttatggatgtgataaatggctgtatgccatgactatgccttggttttggctgatgacgtgtataacctgattgtggtcaggtgtgttgtgcattgacgtgcttgatgattgatttaatgtttcactgacgatgaatgtgtatgagttgagtccttgatacttgatactcctgttatgattatgtgatgatgtgattgtaagtgtgtggtgcatgagtacaagccatgagcttgttctggttttcattgatagatgtatatatattgactgtgtatgtattgattgtttatttccgatgttaatgatgatgataactagcgatatgtatgtgttatcagtgaaccagggaaaggaaataccttcaagggccctgagtttactgagattttatatctcaccccttgtgtgggactatgttttgcaggtgattcttccagagtagcagagaaatcccaaggcaagaggcctatgcaggattagatgctgctggacaccttaggatagaggatatgagcatgtgctcagatattttgtggttttgtacttagccttgttttgattttgttttgatgtaccctgaggggatatttgtacagttttgtattgcacagaggaaccttgatgtatattcaccatattatagtgtacagtgctaatgacagtgaccttttgattatgtcactcatagttatgcttccaaactgcttaaactctgattgattagctgcttgtttatgatgtgtgtttggtaatgaccctgattagtggattggggcgttacattatggtatcagagcagtttgatagggaagcactgtacttatggtgaattgtgtgttgtatttgtatgctagggtgttcattatggtaattgcatgtgtaactattgagaatgagcttgatcaactcatttcttttatgtgatatatgcagtaccatggtgaggacccggaacctaggtggtgaggcaggtgcagatgagcgccctgacccagtgatagaggccttgaccgctatgcagcaggagatagctgcaagcagacaggctaatgaggccttgatgaaggctaatgaggagttgatggctgagttgagagctcggcatagagaggatcctccacatcctattcctgagggcgaggatagtcgccagataggaggatctagtcagcatgctgaggggtacaaccatctcagaggaggaccctcccaatcttatgtagaggaggagtcagtggccagaggtaagatgcttacagcttttcgtaagcatgatcctccgatgttccatggagattatgatccagtggtggcggcccggtggttgcagtcactagagaagatattcacagtgatggagtgtacagaccatcacagacttctctatgccacctacatgcttcatggggatgctcatgagtggtgggtgaccacatcagagctgatgagaggccagggggaggctatcacctggcaggcttttgaggcccagttcttggacagatatttccctagagacgccagagagcagaagcaggcggagtttgagacgcttgtccagggacagatgtcggttgatcagtatttggctaggttcaatgaattagccaaatatgctcatttcaggagagagttacctgacaatgaggtgctagcagctaagttccagaggggacttagagaggacatagaggagaggatagctggcagtgggtccagagatctggggagcctggtcagacagtgcaggcaggtggaagacatgattaggagacggagggacagtcgtcctacacttgttagcagacctgagaggagatctggtggtgcaggcccagccggtaggggcaagggcagaggtccgaaagttgtttcttcttcagaccagtttaagaggagaccgggagataagccaccgagaccaggttcagcccccagatgtaagacatgtgggaagactcactggggtgtatgccgttctggcgtgatggtgtgctacagatgtggccagcctggtcattttgctagacagtgtccccaggccagagatcaggccatagctgctccggtgatctcagtagcgcctgctgcaggcagagtttacacggttgatgcgagagaggcatccagagctccagatctgattcgaggtaccgttctcattggtatgtgtgatgtgagagttttgtttgattctggagccacccactcgtttatcagtgatcacactgctgcaggactggacttgtctatctccagacttctttctcctatggaggtgaccacggcctccagagagcagtgtagagtggagagatgttgcagagatgtacatttcttgtatgatggcagagagtatagtgtggatctgttttgtttgtctatgcctacccttgagatgattttgggtatggattggctgaccagatatggggtcatgctggattgttgtcataagagagtagttgtgccttcagatgatatcagcccgagatcagttgtattcctttctgtgttacaagctcgtaaagagctgagaggaggagctcagggatatctattactgagtacagcggtacagagacagggagtggatatatcagagattccggtggtgagagagtttgttgatgtatttcctgatgagattacacagcttccaccggataggggaatagagttctccattgatctggttccaggtgtgggacccatatccatagctccataccgcatgtctcctttagagttaaaggagttgaaggcacagattgaggacttgttgtccaaagagtttattagacctagtgtatctccgtggggagcaccagtcctctttgtgaaaaagaaggatgggagtatgaggttatgtgtggattacaggcagctaaataaggttactattaagaataagtatcctttgcctcgtattgatgatttattagatcagttgaggggagcctgtgtgttctccaagatagacctgagatccggataccatcagattcggattaagcccggagatgttccgaagacagctttcaggtcgaggtatggacattatgagtttcaggtcattccttttggtttgactaatgcgccagctgtgttcatggactacatgaacagagttttcagaccatacctagatcagtttgtggtggtatttattgatgacatactgatctattccaggagtcaggaagagcatgatgagcacctgagacttgtgttacagattctgagagatcatcagctatatgctaagttctctaagtgtgagttttggctttcagaagtgaaattcctgggccatgtgatctctgcagagggtgtctcagtggatcctagtaaagtggatgctgtgatgtcttgggagaggcccaagagtgtttcagaggtccgtagtttccttggtcttgcaggatactacaggaggttcattcaggggttttcacaaatggtattacccttgactcgtcttaccagaaagggtaatccatttgtatggactcatgaatgtgaggaatgttttcagagattgaaagagaagttgaccacagctccagtgttagtacttcctgatcctgagggatgttttgaggtatattgtgatgcctcaaagagaggtttgggttgtgtactgatgcaagagaagcgagtagtggcttatgcttctagacagttgaagccacatgaggagaattaccctacccatgacttggagcttgcagctattgtatttgctctaaagatatggaggcattatttgtatggtgcccagttagtggtatttagtgaccacaagagcctcaagtatctgtttgatcagaaataactaaacatgaggcagagacggtggatggagtttctcaaggactatgagtttgaactgagataccatccaggcaaagcgaatgttgtagctgacgccttgagtaggaaacatctgagtgtcgcctgcatgatgatcttggactgtgagttgattgaacagttcagggatatgcatttgacggtgactgagggtaccagtggtcttgagttgagtcgaaccagagttgataatgagttgatacagaggatcagagaggctcagaagcaggatgattcgattatagatatgatgggccgacgagagtttcattgggagcctgatgatttgatgagatatcaggaccggattgtggtgcctaagggcgagatggtagatgcagtcttgactgaggctcataagggccagttcagtattcatccaggtgctaccaagatgtatcaggatctcagaaggagattttggtggcctgggatgaagcgggacatcgctgagtatgtgaccagatgtttagtatgtcagaaggttaagattgagcaccagagaccgtcaggtttgcttcagccactacagatccctgagtggaaatgggatagcatttccatggattttgtagttgggcttccgaggactcggactggatgtgattccatctgggtgattgttgatagactgacgaagtctgctcatttcttacctgtgaggactgaccacacagcagagaagctggctcagctatatgtcagagagattgttagactgcatggggttcctgagagtattatcagtgacagagatcctaagttcacttccaggttttggagtgcgcttcaggaggcgttcgggacccagttgagactcagtacaacatatcatcctcagacagatggtcagaccgagcagaccatccagaccttagaggatatgctgagagcctgtgccttggagcaaggtactagatgggatagatacttacctctagtggagttctcgtataataacagttatcatgcgagtttaggcatggctccttatgaagccttgtatggccggagatgtaggactcctgtttgttggacagaggtaggtgagaggcagttgttaggacctgatatggttcaggagacttctgagcagatcagattgatcagagacaagttgttgagagctcagagtcgacagaagagtttctatgatcataaacacaggccgctacagtttgaggagggcgaccatgtgtttctgagattgtccccagtgactggtgttggacgagcattgggggtgaggaagcttagtcccagattcattggtccttaccagatacttcagaaggtcggaccagtggcttataggctagctttacctccccagttgtcaggattacatgatgtattccacgtgtcacagttcagaaagtatgtatcagatccttcacacgtggtagagcctaacactgttcagattagagagaatctgacttgccctacacgaccagtgaagattttggaccgcacagagaagaagatcaggagtaagaccatccctattattaaagttcagtgggatggcagatcacctgaggaagcgacttgggagagagaatcagagctactacagctgtatcccgagctatgtaccaggtatgatcttaattttgcggacaaaattcataaaagggggggagtaatgtaatatcctgaatttcaaacatgtaattaaacttggattaagcatgaattaagcttaggattaagattaggcttaatgaaacatgattatgctcgataatttctagagaggtagcttaaaagagtgagaaaactgtgtctggcctgcggcgcgacccgcgtggtgagtggcgcgatccacgccatatgtataaaatatgtcattgctgtctggcatcccgcgcgagtagcgtgggaacggcgcgagtagcgtgggatggccgagagtatggcgcgagtagcgtgggaatggcgcgagtagcgtgggaagtgccctagaaaaccatgtttcctctggagctccacgcgagtagcgcggatgtccgcgcgagtagcgtggattggcagtgctgcggcgcgagtagcgtgggaaactggcgcgagccgcgtgggaacgacggaaatgtttttataaaggccatttcaggctgaagaagagagagagaaaagagggaagagagagagggaagccattgatgatcctttgagcttcataactccttcattgttcatctaaacacctccgacccaactgagaaagtgatcagagccccgaaaggagagtaaaaccccgatcgatttctgagattagctgagagaatgtgagattggatttccctgagagaacccctgagagctcggagtgtaaaggcgagggaagccttgattgagcgatctatcctagggaaagtgattccctggtgattctgagcgtcgcagaggtaagaaactcgagctctaactgttggttttatggattggattttgtgattttggggtaatcttgaggggtgtttttggaggtgttagagccgtcattaggctcggactctgtagagtcttatgctcagaggacggttctgaagggtttagagccttgaatcatcattactgatgaagtttgattttggctctgagtcagtnnnnnnnnnnnnnnnnnnnnnnnnnnnnnnnnnnnnnnnnnnnnnnnnnnnnnnnnnnnnnnnnnnnnnnnnnnnnnnnnnnnnnnnnnnnnnnnnnnnnnnnnnnnnnnnnnnnnnnnnnnnnnnnnnnnnnnnnnnnnnnnnnnnnnnnnnnnnnnnnnnnnnnnnnnnnnnnnnnnnnnnnnnnnnnnnnnnnnnnnnnnnnnnnnnnnnnnnnnnnnnnnnnnnnnnnnnnnnnnnnnnnnnnnnnnnnnnnnnnnnnnnnnnnnnnnnnnnnnnnnnnnnnnnnnnnnnnnnnnnnnnnnnnnnnnnnnnnnnnnnnnnnnnnnnnnnnnnnnnnnnnnnnnnnnnnnnnnnnnnnnnnnnnnnnnnnnnnnnnnnnnnnnnnnnnnnnnnnnnnnnnnnnnnnnnnnnnnnnnnnnnnnnnnnnnnnnnnnnnnnnnnnnnnnnnnnnnnnnnnnnnnnnnnnnnnnnnnnnnnnnnnnnnnnnnnnnnnnnnnnnnnnnnnnnnnnnnnnnnnnnnnnnnnnnnnnnnnnnnnnnnnnnnnnnnnnnnnnnnnnnnnnnnnnnnnnnnnnnnnnnnnnnnnnnnnnnnnnnnnnnnnnnnnnnnnnnnnnnnnnnnnnnnnnnnnnnnnnnnnnnnnnnnnnnnnnnnnnnnnnnnnnnnnnnnnnnnnnnnnnnnnnnnnnnnnnnnnnnnnnnnnnnnnnnnnnnnnnnnnnnnnnnnnnnnnnnnnnnnnnnnnnnnnnnnnnnnnnnnnnnnnnnnnnnnnnnnnnnnnnnnnnnnnnnnnnnnnnnnnnnnnnnnnnnnnnnnnnnnnnnnnnnnnnnnnnnnnnnnnnnnnnnnnnnnnnnnnnnnnnnnnnnnnnnnnnnnnnnnnnnnnnnnnnnnnnnnnnnnnnnnnnnnnnnnnnnnnnnnnnnnnnnnnnnnnnnnnnnnnnnnnnnnnnnnnnnnnnnnnnnnnnnnnnnnnnnnnnnnnnnnnnnnnnnnnnnnnnnnnnnnnnnnnnnnnnnnnnnnnnnnnnnnnnnnnnnnnnnnnnnnnnnnnnnnnnnnnnnnnnnnnnnnnnnnnnnnnnnnnnnnnnnnnnnnnnnnnnnnnnnnnnnnnnnnnnnnnnnnnnnnnnnnnnnnnnnnnnnnnnnnnnnnnnnnnnnnnnnnnnnnnnnnnnnnnnnnnnnnnnnnnnnnnnnnnnnnnnnnnnnnnnnnnnnnnnnnnnnnnnnnnnnnnnnnnnnnnnnnnnnnnnnnnnnnnnnnnnnnnnnnnnngatactcctgttatgattatgtgatgatgtgattgtaagtgtgtggtgcatgagtacaagccatgagcttgttctggttttcattgatagatgtatatatattgactgtgtatgtattgattgtttatttccgatgttaatgatgatgataactagcgatatgtatgtgttatcagtgaaccagggaaaggaaataccttcaagggccctgagtttactgagattttatatctcaccccttgtgtgggactatgttttgcaggtgattcttccagagtagcagagaaatcccaaggcaagaggcctatgcaggattagatgctgctggacaccttaggatagaggatatgagcatgtgctcagatattttgtggttttgtacttagccttgttttgattttgttttgatgtaccctgaggggatatttgtacagttttgtattgcacagaggaaccttgatgtatattcaccatattatagtgtacagtgctaatgacagtgaccttttgattatgtcactcatagttatgcttccaaactgcttaaactctgattgattagctgcttgtttatgatgtgtgtttggtaatgaccctgattagtggattggggcgttacacttactctcaaataagtatgtgagtgagctgagattgaatgaaaagtgaaggtagaacctgactatttatagcgtcggacgcatagttgtaaaagctgatctggtcattgatctggttgaggtagtgggttagtagtccaaccggtaggccaataattaatccagtatatattataatttaaaattatatatgtatctattatatataagtatataactaacaatatttaagtaagaaaaaattcattcatactccaaaatccaattttaaaaaaaaaaccgttaaaaaaatggtcgggtcggatcggtccaaccgggattcggtgaccgatccggtcgggtttgaccgggtcaactgcataatcgattcgaaagtggaaccaacccagtaaggctaccggggatcagtccgactggctagtccagaccgagtttgataacactagccggacgggagccttggacccttgattgtcggagttgttataacaacataacaatcctataggtaattcgtacccacttgataagcggttacctaacagtataacaactctatagttaatttgtagccacttgataagcggttacctaacaacatagcaacttatagataactcaaaataaggagataataccattatcattaaagttcaaacatatatcaatagcttatcagcctaatcacttgactagtgagcgagtagtgtctatgctcctgtactagaactggcaagtaggattgacatgtatattttaacaccacgtcaaggccctcaacctatcaattgtgatttttatggaggagatcatttcaatgataattgtcatgtagaagaaagaatctctgatcttaagaatgtgttgatacaatacatggaaactttccaagctagcttcataaccaatcaaaactcaattcaaaatctggcaattcaagttggtaagctagtaaaacaagtggttgaaacgtcttttttggtcacaaaggatgaaaattttgtagaggttacaacacatgtggagagtcttgttgaaacaagaaaatgatgaagaaaaaaaaaaagagaaaagtgaggagagaacacaacaacaatgggagaaatgctcacaagtagaaattcaacaagaaagccctctccaagttagtacctctcctcatcaattgattgataagaaagaaaggcatggagaatgtgatacatccataagtgtcattttttccttgatcaccaacacttcccttacaatgatatggaagtcgtttcatggatatatgattttcatggagtctctagctaagaagtgaaaatgctaggaagatgtgttccatgtgaccttcatgccaccttgaaggcatttggtccgccaagctagtgactttaaaaaagcgcttattgggaggcaacccaacatttctacctttgtctctatttctatgaagtatttaatttttgtgtgaatttaatttttcttttatctcattttttttttgtctctatagatggcctctggaaaaagacgagggtccgcctctcaatcacatactcagggagcatgggacccatggtcgacacaggattgagaccatctttttctttttttagacatattcttttcttttctttctttattttaatttttgcatctatccttaaatttctgcactctagtcatttaaattctgcaatttatagtttcttgaattttgcataatagatagttattttgatgacattttttgagcatgttttgatttaatcgatcatatgattgagattttgcatcttattaaattggtgaatttatgattcttgattaaacacaagctattgttgattgatgtttttatgaactaaatgtgtgagtgaatcagttagcttgcatgatataaaatcttgtgaaagaaagacttatgcttcaagttatcatgtgagttgtgtgcatttgaactgtgagagaacaattgtttttgcttttctggctttgcatgattcttgaaccttgttgataatttagaatgacattgtttaaccttaaatataaatctctattcttaacgcaaattatttgatgtagcttgctgagggatcagaagtgaaattaggtaatttaagttcttacataggagggatcatagttagagtaaattagaggatggagataatatgtaaaataacattaaatagtgaaaaatcattaacattgcatcaagagtagttttggtagactgaacacccaacatattacataattctgcatcaaccttcaaatcacctcttccagtgtttgtacgtgcccataatacatagcaaatgattgtatttgaattttaatagtgaaaattattataaaaaaatagaaaagagaagtagcctgtacataagttattgaagtgttgtgcaatcgaggggtaaataccaaagagatttacactaataggcctcgagcaaccacataagtgaacctgacaccatattttaacccaaaacatacaagctcaagtttctgggtcttctcctcacttatatggtgctcaactttttcatttctactcgatgtgagacttcacctcacacttgtactccaacaatctctccctcaagtgtgagtctcttccacatagtagcctcgtcgagcataagctatttttaatccaaaagtatccaatggtgacccttagagattaatcgtggttgtcccagctcgtctaaccattgtcgccaacatgctctattaccttgcaccgccgcaacacctgcgggacctactgttaggagtgggcatggattggatttctaataatccaattcatatctacttaaatgggttggatcttaaatctatatccatatttaaaacaaaaaataatttggattcaagatccaatccatttaagtggatatggatttggtcatattcaatctatatccatttaaatgttataaggattttttcttacaaattttagtaatcaaactctaaaaagtgaaaacttagcacttatacatttaagagttattttcaaccaaccttggccaaaactatttttgatcgatcatggttagggtattttcggcctatctcaaccagggcaatttcggttaacatcgacccagacatttttagatcgacgtcaaccagcactattttttggctgaccaacgtcaatgcattttaggtcgacgttgatcaaggatgtttttggtcgatcttaggtaggttatcttgtggttgaggtcgactagggtttttagtcaatgtcggtaggtgatatttttggccgacatcaactaggggttgtttgatcaatgtcatcatgacaattttttggccaaccgtggttagggtttttgtgaccgatatcggtaaggtttttttttgtcgatgtcgatcgttgatattttttggccaacatcagtcaagattattttttggttgatgctggctaggtttttttattgacactggttaaaactattgttttgttggcgtcaactacggtttgttggtcaacatcaaccatgactatttcttttggtcggcgttggctagagatattttttgttgacatcaactaggatttttttgatcgacatcaattgggggaatattttgggtgacatcagctatttttttttttgccgatgtcggccaaaaaaatcctagtcgacgtcgacaagaaaatagtcttctttgacgtcgatcgaaaaaacctagtcgatgtcggtggaaatatatacccaatgtcaaccaaaaaataggcttaactgatgtcggtcgaaaaaactttggacgacatcggcaaaaaaatagtgttgactaacgttggtcgaaaaaaatctttaccggcattactgaaaaacagtctcaactgatgacgacttaaaaacatcatcaattgatgttgacaaaataattctagatgacatcaaccaaaaaataactcctaccaaagttggttaggaaaacctagccgtcatcgtccaaaaaattgtattggatttaaaaattcaaataaatatccagattatcttatgtcacatccattatcactaattattaagagattaacattgagtatgaaaaaaattaaataaattatcttatgtcacatcactaaatttgagccacatcaagtaatttcttattgataaacacttttcaatttggtgaaaggaccaaaattgcgggttttacaaaattggaggactaaatgtctctctattttaaaatatggggactaaattgctgaattttaaaaataggaggactaaatatctctattttaaaatagaaggaccaatattgtaaatttttataaataaggggaccaaaattacatttaagcctaaactaaattgttctattttttgatcctttttccatttttatattaataaataaagagttaaatatgtttgggtctttgtaaaatttgaaaagtattttatctttataaaactttttgtattaatttggtccatgtaaaaataaaacatatttttggttgatcttcaatggtaactttattagatgatactcaaacgtgcttaatagacttaaatactttctatctttaccttcccaagtactaaagaaaacatattttcgttcatcttcaatggtaggtaactcttaaatgattttcaaatgtgactaatagacttaagtactttctctctctacctttccaagtatactttgaagacaccaaaacccactgttgttttatctttccccttaatatcatgggcaagtgtgagaaaattgcacaagatatgatgaaaaatgtaatttttgagaattttgagttgccattaattgtttaattcattttgaagttttttaactgttacaaattgtttaacattttgaagttttttaatcaccacaaattgtttaattcattggtaatcaaattatatgtgaaagtctattagccaagctagattaccatctaaagaaattatcacaaacaaccaacaaaaatatgttttatttttatagggaccaaattaatatgtaaaaatttatgaggacgaaattaataattttcaaattttataaagatttaaaacattttttatccataaataaataaataataaatatccgaaagagtggagcgggaatagaaatttgaatttctcagctctactctctctctctgaacgttcggtaacattttcaaatctctctctttctccgttcagcaaaattttcaaatcaatcttcttctctctctctctctgcaacttcgattcaaatatgggcgttgagaactaccacgtcatcgaactcgtcggcgagggttccttcgggaaggtatacaagggaaggcgcaagcacacgggacaggtacactactctcttccgattagggttttttttctcgtgaatcgcactttcccgattactgtctcacttctgattttattcgatctcagaccgtcgcgatgaagttcataatgaagcacgggaagaccgagaaggatattcacaatttaagacaagaaatcgaggtaattcattccttcattcatttcctcactgttttcacgctctttgaatccgtgttcgctgattgttgtggatttctagttgttagaaatttcgagaaccgatggattctgattttggaacaagcatgttgcctgagagctatgataatcagaagtacggagttaggaagcttcttgttaattgttgttgttgttgttgttgttgttgttattgttattattaatgttcatagactttggtctgtcattgagaatgtgaaatctgttttcttggaaatttgtgatttaattatttttgtaatattgtatactgggctgggcattaatttttaactaatgttctacacggctgtggttaagtgatacttaagacttgaggaaacattaggagaattcaaaaatcattagaatttttttaaatgattgttgtggtccatttgcttaattgatgtatgtacctggctttacctagtaggataagatttttttattttttattattgttgttgctaattattataattattaattacttataagtgtttctgctgattggtgacatttgatattcataaattttgcagatcttaagaaagttgaagcatggaaatattattcaaatgcttgattcctttgagagcccacaagaattttgtgttgttacagaatttgcacaagtaattatctgcattttcagttgacggtttgactgatacttgaaagttaccacttaccccttaattggtgatctaagtatactcagctatctgattgtggaacaggacactgaattattagagatgctgttgagctgattatatttttttattttgtagggtgagctatttgagattcttgaggatgataagtgccttccggaagagcaagttcaagcaattgcaaagcaattggtatttcctcttaaacatctttgctctgtttttcatagcatttagatgacgagatatgaagataaatcttattttggcagaagttcatttttggtttggattatgcaggtaaaagccttacattatttgcattccaatcggatcatccatcgtgatatgaagccccaaaatattctaattggtgctggatctgttgtcaaggttgatttaactgctagtttgttcacatggtgaaacatacacttaaaacatttttgtcttatagcttgttgcaatagaattttgccactaatcgactttctagtgtcatggtttacattatacactgagttaaagctttgtttcattcaataatccaatacacttttcctataacgcatttccctccaagaaggcactttgtgcatgtttggttcaacttttataagggaaatgattgtttttttccccaaaactttcttaggaagctgtaaagaaaaagcttttttgaccccataataagataattcaaacttgcattgcctcatttttatcctactcactagcgaatggttttcatttctactttcctgcaatcaagtgcatttgacaatggtctaatgagtggtgtttttcttttttcatgaatatcttatagctttgtgattttgggtttgcacgtgcaatgtccacaaatacagttgttttgcgatctataaaaggtttggcttatgagaattgattttgttgcttttggaatcttaactgtagaaatgtagctgcttgtactttgaggatttgttctacagtctgcatatattttgacctagtatgttttacaggcactccgttgtacatggctccagagcttgtacgggaacaaccatacaaccacactgtagatttatggtctcttggtgtcatattgtatgttgaatctctctctatttatcttggtctagtaatggactttatctttagttttacattgtggatttgtggttgtggatgattattgctcatttaaatctgggctaatgcctaatgtctttataatagatccttttacaagatttaaattgcagatgatattgtgcttattgatgagaccaaagatgatgttaataagaaattagaattgtggagaaacactttggagtctaaaggattcacgataagtaagagacggagtatatgaagtgtgagttttcgcgggtaagagatggtgatcaagacacaatgaatctacttggtcaagaggtacccaagaaaaatgtttttagatacttggtatcaatgttgcaaaaaggtggtgagattgatgaggatgtaaatcatagaattagagcatggtggatgaaatggcggagtgcatcgggatttttgtgtgaccgcaaaattccccttaagttaaaagaaaaattctatagaacaactgtaaaaccgacaatgctatatggagcagaatgctgaccagcacataggtaacatgagtataaaataggtgtagcaaaaataaggatattaaggtgaatgtgtggatatatgaagaaggataaaataagaaatgaggatattcgacgaaaggtattagtggtattggtatgtgaaaagatgagggagcatagattgaggtggtttgagtatgttatgagacgaccactggatgctcccgtaagaacaagagtttgttaccaagagctcaacacaaagagaggtagaggtcgaccaaaacttacctgggaaaaggtaattaaacaagatctaatggagtgagatatagattggcggacggtatgtcttaggacagagtggagaaaagttataagcttggtggagggttaaacccattaatagttctatgttccagtcattcccttgttttagttcttttcctcttcttttctctcttcttcctttcacccctcttttattttagttttttttttctttctcttttgtcttatttcagcttttttctttccctttctctttctttgtctcatttttgatttattattgagtttatttactaccgaccttaattaaattgggttaaaggtgctgttgatgttgatattttgcagaaaatattcatggattataaatacaatttccatatggatgaattatgagtgtcaatttaggttctttatataattgcatgaggatcccacacgagcctaagtgtgcaaggatatttaggggaatggaagagggatgtatataatacctgccttttgtgttttactaagttaaaagagagagatggctgctatatgaagttgtccttggtgtttcttttttctttaccactcttacttggtttctcttttgaaaaataaccatcggaaagtaaccaatggatttgccaaattgttctttctgactatgttattgagcagcactttttttttttcaatttgaggatgagggcaatttctcattcttctttcttctcctttctatttgtcatatccttattccatctttcgaatagaacttctcgtttcattcaagcagtagatacttacctcagcttcttgcttgtagtattcaatgatttctttcccttacccgtgtatagtgtgaatattccggacctgttgcactttccaaaagtgatctgaatgatgacattgtgttactaaatactgatagttatggtagtgtgttttgttgaacaacattttctgaccctcagttttctttgctagtcataagtcaccttaagttaaagcctatttttcatgcttataacaggtatgagttatttgtaggccaaccaccattctacacaaattctgtgtatgctctcatcagacacattgttaaggtacatttctcaaacgcattacatttgttatgtaatcaattatgtgttatgtgctagtactgaacgttgggcctgatcactagtttaataatccaggatcctgttaaatatctggatcgcatgagtccaaatttcaaaagctttttaaagggtttgcttaacaaggtatctcatttgtgaatatttcccccttttttattgcttcatcgctatattttacttttatcaacaatgagattttaaatgctttggtttctaaatttatttcaagcaggcaccggaaaatcgactaacttggccggctcttcttgaacacccatttgttaaagaaagctctgatgaacttgaggccagggtagctatattaaactgtgttagattgttcctcaatctcctcaatctgcaagatgctcattggatttgtaacttggttgatttcttagtgaatttaataaattatggcaggaattgcgagagataaatggttcacacatgaatagggatgcagcacgggtggttgaaggaaaaaccattcaaactccgacaacaggttcagctacttttagtactgcaagatgatagtacctaccttactactagatatattaataaagtaccatttcaataagcctatatgtttgattttctttcccttcattgtaaaaatttatttatcacaggcaaaaacaatcacatggcaggtatggaagagcatattgcttcaccgcttcagagtgcagttcagttaaacagtcctaacttagacaaagccaattattcagtgcttgatgagtccccagtattttcaaatcaaaatgtaggagagtcaggtagttctcttggcttggcttatattcaaatcaaacccttgtaacatactgtgtaaacatagaaacttcttgggattgattctatagttgctttgtcttgttccttgtactagaaaaaagaatgcaggggatacctttataagattggcttagataattccaaataaatatcagagcaatggcctcctggaaattttcacacattttaggcagagttgcagacattaatgaggaatgaatgtatgctttagttatgtttgcatctatttagggaatttagtgagttgttattattaggtatgaaactatgaacttggattataattttattttattaaatttctgaaacaaacagtcaaatgtctccattattattattctttatttacatgaacacctgtaatatgagattgacgtaaatacttctgggtaggcagccaaagattggacagacttgaaaataactctcgaacagtcaacggtgcaaaactaattggccaagacaatgaagcgttgggacatattttgctaccactgaaaaaatggtcaaaaggatctcaaaatgtttgcaggtagatatgaactgcatacttaaaacttttatgttgcatattgaatcctcgtgaatctcattaaatattgagttgtttttaatatctggagtttactcaatttaacttttgtttaagattttgttcattgtcatatgcagaagcaggacattttttttgacttggaatgtagaaatgtcatggttttgttatccttctagagcttcattttcttgcttttttgcttaacgtataatgttttgttcatagtttttaattggctaaatagcactttggtcctcgtactttgcatttggtggcaatttagtccctatactttgaaaatgatcaatttagtctacaaaagtgcaaatgttgcgacaaactagtccaactgttaagtatccattgtttccattaatgttaagtgcatacgaggcatgtcattactgatgtggcaaatccacgtgtgtagaggacgttccacgtcaacgcacagtggtttggtctaaaatgtcaagtgttttttttttttttttttttactttttttttttcttttctattatttttatctcaacttaatctatccttgatgacctccccttttctcctttggtttctcacagatgatggttcccttttccatgtttgattgtgttgccacacttcatcccccaaatcttctttttctctctttctccattaatcattacttcttcatcaccctcaccctccatctctttgttcctcttttgaaaccctcaaaatccaaaacccttcaaagttatagttataattttagatccaatggacaattaaaaccccaaaattatagtaacaaaatttcacaaaattgtatagagaaaaaaaaaacccaaaataatggatggacaaaatagattctcccatgcataccgttaccatgaattgcacacaacggattaacaaagaaaagccgtgttcaacacaaaatcaacaacactaatacagatctatactgctagaatcagcactatgaacactgtgagagggacaaggatgatgagtggatagggcttgtatttgggctagagagcagcgagggtgtgccggtgtcgaggctgctcccaagatcgatagtggcaaaggcaccgacctcaacaaagatgcggtggttggcatcaaagagcagggcacaaagatcttggttttggcggtggctacaatttgggagccacaagatggtggtttgcgatggaaggagaaagagagggaagagtaaaacgggaaatatgtcatttagttctccatgttagcgtttattgtcgcagtgtcgatgatgatgtcgacagctaccttttgcagcaacataatttgtcatggaccgttttgtcatttagttatatttgttaaggactatgttttgttgttgcataaaaatctattagaacgaagaagaatcaacatcttaatatatgcgttaactacgtaaatttaaaaatcaatgctaaaaaaagtcattgacattttagtccaaaacattgtgagctgatgtggaatgtccccacacgtggatttgccacatcatcaacgacatgtcacatatgcactcaacgttagatacttaatgattggactaatttgtcacaacatttgcacttttgtggactaaattgatcatttccaaagtatgaggaccaaattgtcactgaatgcaaagtacaaggaccaaagtggctatttacctttttatatctaatcacaaatttgcaacctgctttctctctctctaattaagtaaaccatgtgttgcctgtttcacttttttgatggcctgctctcctaggtcagagtgactgtttagcagtcattgtgtaaactgtttaatcttgtgtttttctcaaaacgaattacttgaaatagccttagtttatgtgttgggtaattataaatgtaacatttcaggacttttttttcttcttaattcttagaccactagtttgtaatgtgcctggctcctatcttgtgctggcagcaccttgttatgtcatatatgtaatcataaggtctctcttgtgttcttgctttgggttttttctgcaggtaatgttcttatatagtaaacgagacaatgagttgttgaaaggttttatgtaatttactttttctattttgataattatcttctctgttgattgtgaaggatgttatatcctccactttgcattgtcattgtctcttagggaagttttattttatttcgtaaaactagaataaactagtaaatgatgcaaacgtgctaactaatattagtatgattcacttgcagagtacttctgcatcacaaacctttttaagtttacattgtttctgacaaaatcattgttttttattttccaaattgcaatgccaaaacaatagtctagtgtttttttggccgcttctctttgtgtaatttttttcctaaaaattaggaggttacctttagtgtagtgttgttctattctttttcctctacataaaagtaaaatcaattggattaatgagtgagtttttatataattatttaaaatttaagtctcttatagcatttaaatttcagtaaaaattgaatgaatggttattgcttttctagaccctaccaaatcatttttcttaattatttatctatgaagtctaattgtgtgttagcaatgtgcagtgatcaagatgttcctgaatcaaaccagtcattgaggattctctcaaacctagttgcagctggtgctttcagttctaatggactaatagatgaactaatacgagagctccttatgtttactggatctgttatagccatgaaatcctctgaagttactgacatgatggcaaaggtacatcacaaaggcatttgatgtgtttctttctttctttcagaattataaactgctgtatttttttctatatggctggttaaacatgcttggatagtttgatgtatgttagaatatctcatagtctgtaaggatatcttagaagattttttggaatataatatattattgaatcaattagtttgatagtcatctaatttagaaagcaatcttagtaattgttgaagaagcactcttaggagttgtctctaatttcttatgtttcttaatttgtttccttatttaatttgtttagagctagtagtcttatttattgtattagtgagcttgagcttatactagaaaacaacaatgtaatctgattcattagtaattattagtataacttagtgccatagctttgtgctttatacacattgtatctattccatctcgtactattcatgaagctattactcccttgtacttcagtccatcctaagccccaaaatttatcattgtataagagtggttttgttcaccttgagagggcttttccttttagcaatgctgagttcccataatctgaactctttttgagagcctgcatatttttaggattgttttcttttagtatgtattgggaaaattggtgtagcacgtattgtggaaaagatgagagtcctgcattagttgatttgggcatgtagggaaaaaactagtagactgtagaagccctagtgtttgaaagctaccttaattgtgctcagtggtcacccttagcctgcttcagttgtgtcctatcagagttgatggctagtgtcttggaaaggataccaatgctgccgatacatcagatctcagggggtttagatcccacattgactagaaatatgaccaatgtagtctttataagtctcgagcagtcttcactttacagtctagttttgtggggttgagttaggccttaagcccaaattctagatcttgcaatagttagaggtatagggagaataaggaaaactttaggcccaaccattaaagtaggatacagattcaaatggtttgccattagagatgatttatgacggacatcatggcatttcttgattgatgtagttgagaaaggattttgtagcacatttatttttgtcatgcataaacctcagtacatgcattaaacatgattctctttgattaatcaagcattaaactgggtttgtctatttttttttttttggtggatggtttttgaaaataattggcaatctttttctcttgagtagctagtgaaacttaatatgttttattttgtgcagagtttctccatcactaaaattttgcttgataatggtggaagttgctgttcaagctcttatctaagtcactgggttgaatttgttgagatctattctcaggtaacaatcttcctatcatttaaattcacatctcgtaatgcatatttatattgagttgtatcaagtaatggctttttatccatttcttcgcccatacctatcatacactatatactagtttgtataactttagatgcaaaagctcttgataattgtgtatttcttacatgcttttagtacttagtattatatgttttttcaggttgtagcttcaaataatgatgcatctggaagagttctgtatgaatctagtgcctgcattacagtcatgctgtctagagttgctcaggtgcttagatcatctaaaatttcaggccaagagaaactgaatgaaactgctaacagaattttagagcatacaaaaacaacgggtttagtagaccatttgtgtctgtgtttagccacttcaggatcgagtcttattacaggttcttccaatatgctacgggctgcttctgaagcatgcagagctgtctggtctttgattaatgcactggatatactttttatgaaaaaaagtgccattctgtttcccattaatgctttgcagagtcattctttgcatagggtggaagttgtgcatcatgagcaatatctcttggataaagcagattcaactaaagttgttgatgcaatgaccagagcattcctgagatctaaagctgttctggttgctgtttactattgttttcaccaacaacttgagtctgcaatgaattgtggtcttcaggtaattatggtttaccccttgccctttttggttattccttctacggcaacaagttttatgcatattttagattggataggtaaagtagatcaatctgatattctttgctgttttccttacgaagttgtagcacttgttatttggacaaagcttgtggttgtagttatgacagagttgaaggtgatttaaattgttatattatgttttttcagcttttgtcaagatgctgtctacataatggaattgttcctgctctcctttgtggtcttcccagttcccttcccgtgactactgttgttagtggtggtggtgatggaactattgtttcagaagttttcactgttttatcattatgcagttcctctgtaaacaaagacacacaaagtgtggaaccaagtaatgccaagtgcaaattaacaaatccttctgctctggttcgtcattcatgtctcctcgttgcagtaattgctcagtgtttgaagtcgtctggaagaaattcagcaatttttatgctcactacctcatcaaagaagcagcttgctcgactatcaatgcttgctcaccaaatttcttctgatgataaaataaaagcctctattgagcctcaaagtgcatcagctatgttggctctggcatccattctatcccttgaatctgggactttggctgagtctccaatatctgaaattgctatgcctttaattcctcgaacttctacactaagtgaccatcttaaattttcatctggcaatgtaaatgaatcggacccttgcaacatcagtgggaagctctcatattggcaaggggtaagagatgggtgtgttggtcttttagattccagactcaagtggggaggaccattagctgttcagcagttgtgtgcaagtggtactcctctacttcttatgggcctactaggcaatgatgttttaaatgcttctcatggaaatgaccatgtaaatgatagagttggattgtctcctattggtgttgtatggacaatttcatcattatgtcattgtctttctggtggtgctttgacttatcgtcaaattttgattaggaatgaacatattaaactcttttccaacttgatatgtgatgttcatatcaagttggtaaaatgctggatcggacctggtggagggagagcaggagtcagagatctaataaatgcagtaatagatctcttagcatttccttttgttgctctgcaaaatgcacctgggttgccatcagccactgcttctgtcagcagtgggtttcttcttaatattggctctcctggtcagagagtatgcatggaagataagggtatagttaaggcaatcgaagaagacatgggaaaatatattaagattcttgtagaggtaaattttttattgtatcgttttggtaacttttattggagattgggaagcttcaagcaaatatcattgtatcatgtgataatgagatatcattgcatcatgtgataatacgatgtcactgcatgtcaattcattttccttatcgagcagtggctgatgatggttaagacactgctagtcttctctgcttcatcaattattgcttctgtgcagacaattcttttgttggttttactttattaactgtgctattagtgcctatatttatatattttcacttgattacctgttgacttactatgtttttaactttcttgctcaaaatgatatccttattaattggtttggacttttcaggtgggtgtgcctggtattatccttcgatgcctagatcttatggatttgaatgatttgggcaggcctgttgcttttctggctaaaatggtatgccaccgacctttagcaatccaacttgtgagtaaaggtcttttggatccaaataggatgagaaagttgtttgactgttcagccccaaaagaggtgacactggatgctcttatgattatttctgatcttgctcgcatggacaaggttagttttcattcttcatcaaatgattttatgtgaatgcaaatatcaaagttggtcagttattaactttattatttctgtcagtttgcaaagggtggtggatacacataaaagaaagtgatagatggtggagatattgcatgccatgcacaatcttatttactgcatgtatttttgtgttaaaaaaaatacagagaatccttattttgcttatttggtattccacagattttgccattctgaatttaatcctcttaggatatatttagtttttatggattcattgaaattttagactttctagagcctaatatggcttcatttgatccttatatcccaaccaatcttgggcgataaggctttgttaaccggtatttgtttcagcaatgtcaaaatgtcactttgatttcagttgattgtagttttactttgaacaaatatatatttgtggtttctggtcacccattcataggacagcttgaattatgtttttattttgggcattttttgttgttggtggtgaatggacacaatttagttctgtatatttacacttcggatattccttgatgatagttctgaaaatcattactatctattttatggtgttcagggattttatgactatattaaaggtgcttctgttttggagttcttgaaagattttcttttgcacgaggatcccaatatgcgtgccaaagcttgcagtgctcttggaaacatgtgtcgtcatagcgcctatttttatagttcacttgtaagtattataaataatgctatttatccttagagtactttataaacataacggaaattaaaaggaagaaccaatgatattttcgtttaatgaaagctacttcctttttcatgatttaccctacctcagcccttttctcatcttgttaatatttttttgtttgctgttaagcaattattccttttgcaagccctagatatatacaattttgtaaactagatttatactgcggctgttatctgtaaggaaaaataagtgttcctttctggatgacagagcacacattacattaaggtttctgacactatgctttctgctgttctcctattttgaattctcttatttaccattgggatttccaggcaagacatcaaattattggtatccttattgaaagatgttctgatccagacaaacgaacacggaaatttgcttgttttgctgtaagttttatccatcccactactgaagccaaaacttgatattgaacatgttattcatatttatttcttaatacaatgatttatttatttatttacgttttagaagattgttgtgatatatgatttcccatagatatgaatgtgaacataaaataaaatgcagtctactagttattattgttactgcatttgatgaatttttgcaataaattatttgtatttaatgttttacttggcaaatacttaactttttaattgtcaaacttacagagatgggactaatcatgcttatgctttttcataccctatatatgccacattttcttcttttttcacctctcttttaatctgctgtaccatacttgacctcagattggaaacgcggcctaccacaatgacttgttgtatgaagagctgaggaaatctattccacaattggcaaatttgttacaaatggcagaggaagataagactaaggcaaatgcagcaggtgcacttagcaatctggttcgcaactctgacaagctttgtgaagacattgtgtctaaaggagcggttcaggttagtgcatactgcatcttttaaatattgtgaaaatttctatttatgcagccaagtcaaatttgctttagaattttgcataaagtactccagttttgttgtctgagtttaaattgctcacataaacttcattttttatattttcaaaatttactttaagtgttttaataaattgtgaaaagcttgaatagttttcaagcgaaaaatatttgtaaaaatagaaattaataaattaattcaaattataaaaatatactttaaataatttacttatatgtaaacttttgatttccctttcatgtcttttgggaagatgaaagtcaatcatggctatatttctcattcacaaaaaaacaaaacaaaataaaaataaaaggatacatcctgatatgaatcatgctgcggccacacctgagcaaaaatgtacaaggaagcagaatagcattagttggacataactaataccgttaacgattagtcctggtatatggtgttttaagttggttgattagaataacattagctatggtgctaatgattgctgtaggataaggagcaggtgcttacgtgataatttgtaagctgaaaatcagtgaactgaaaggattctctcttaagtgttcatatcacattcacatcactataattattgtatttttaaactctgacccattttgtcaacattttaaagatgaaagtaatcttctaacgcattacgcttgtcttcaatgattcagggggatttgcaaattctgtgttgcttaagttgagtataacaaattataagaaattagttttatttgctagctttcatattttaattttacaggaataggacggagtgtatttgagagtgagcctagcattcctctaaatttaaagaggaatgcgtttagaacaacaaattgagaagtgttagcaacatactttttaacacactcctctgtatacattcctctctcttattggttaaaatatcaggagtcattaaatgagatatggaatcgagagagggtgcattcaaaagagcctgttcaagtttctccaacaaattattataaatttttatggtacctgtgattactttaactgctagctatgattgtaactaattttctgtatgccttgggattattctcccttgcagtctctgctgaaactaatttccgattgtgcggtatcagcgctcaatccaagcagaaatgattcagtaaacgaatctcctctaaagatagctctcttttccctagcaaagatgtgtgctcatccactctgcagacagttcatccgttcgtcaccattgttccctgtgattggaaggcttcagcagtctccagaatcatccattaccaaatatgcctccgcgatcattagcaaagttgctgaaccttgacattttataagtctacttcaaagttgtgccactgttttcatgacttctactgaagtcattattgtctttctacattgcttcttgaattgtaaggacattgtatcactgcaaataattgattttgcctagtcatgccttgtagtagccataggaaagaaaaaagtctttagtatgtgagatgaatcgtttaatatgtaaaatatgtccatgttaatatattgtaatgttttttttcacaactgcttggcttgtctgtaaggctattctgttaatttcgctttttataaccaaaacaatcagcttatctattatgcttagagctgtgcttatgaacccgcctgtttaagtctaccacaaaatccgcaacccgcgatgccaacaattaagattgtttgataaaactagttgaaaaattagttggaatttagaaagttaactaaaaattaaaaaactaattagtaactaaaagtttaaaagttatattattgaattataatggtttgttagaattacataaatgaatgatttatgtaatgtttttatacaaattttgattctctagaaaaaaaatatactttgtagtatttataattttaatattaaattaattttaaataattgtagtttttatttataaaatattaaaaaaaactacataaatttattatatcaccactgttaatataatatatgataaatagttattttcgtccttaaatgtgtagagcgttgacaaatttgttcagatgaaaattcaaattttagtcttcgaaaattaaaaaattgtgataaatctattcatctgttaattttcattcgttactgttaatgaaagagtttacgtgacatattcagggacgagtttgtcagcgtattacacatttagggatgaaaatgactatttaccaaaaatataatttaatctccatctttctctccttttttaatagttgcaagtataacaatacaataaatacttaaaaaaatagaaaacaagcacaagttagaacaaacataataataaacataatattgattaataatcataatttgtctattgctctaaaatttccaatgtgacagtaccttacccaaaatatgagactcaaacaaaaatgcataaatttatcacacttttttaagtttatggtaaagtactatcacatttgaaatttcaaattgaatcattttttcaagtgcttattataatattaggctcgtaacgattataaaaagaaggtaataaaaagattaaattatattttgggtaaataaccattttcatccctaaatgtgtagagcgctaacaaatgcattcctgcatgtgccacataggctctttcattaacggtaacagacagaagttaacggatggatgaatttgtcgcactttttcactttcggggattgaaatttgaatttccatcattcagggataaattagtcagcattctacacattcagagatgaaaatgactatttatcctataatatttaatgcataaatgagaagttagaaattagcgttttaaaaaatattacttcaagaaaaaaaagaaataaatataaaaaagtaaattacactcgcaccccttgtatttttctcaaattgcacttgatacccctccctttttatacattacttttaccccttctattaatgtcattaactaacgtcaattgaaatatctaagcagacgaaattgtccattagagtaaattgcattcgcacctcctgtgttttccacaaattgcacccaataccctcctttttatacattacttttactcccttttgttaatgtcattaactaatgccactgtccagggaacgaaacacaacattgatggtgaccaaagctatggtgggggacgaggaggtgatggaggtggtggcggcgattacggtggtggcggtggctatggtgaaggcggtggctatgatgttggtggttgctttggcgggagtgggtgcactcgaacgccgtgggagagggaggaggaggagaaggagaatgaggtgatggtggtaagtgacgagaggttgttgaagaagatgaaggtattttagacattaattttcattaaaagtcatgtgaccaacatgtaactactttctttttaattattaaacagtatttagaagggacgatgtctggtgtaatgtgagttaaacaattaatgatttttttgtagggtgtaaaataagagggatatcaaatgcaatttgaaaaaagcacaggggtgcgagtataattcacttaattagaagttaacgttttaaaaaatgttacttcgaataatatataaaaaatattaaaaattattaataaaaactcgtttatcaaatagtcaaataattttttaattattaaaaaaattataaattagttgaaatgtgttgacaaacacactctaaatggattctattttagcgagcttgcaaccgcattgtttcgaccgcgggttgcagggattggcctgcataaaaaaacataaacacaacagaatattaaatttaaaaatctgaaattttaaacaattgttttaaaaaatcaaataaaaaagtaactaaaaataaaattaacaatccctttgttatcattttatacaattgaagtgaggaaagtgacattttatgcaattgaaatggagagggagaatgaaatacaatctttttcatttttttttactaaacttaaccactgaaattattatttttaaaattaaggtattaaaagcctgcggagttcgtggacaaactgtttaatctgggggcagcctgtgggagcaaatccaaatgttggactctaattctgttgattgagtcattccatgatttgcactttctaattttttttattttttattttttataataataaaatatatatggataaaattcgttattcataagcaaaaaaaagaaaacaatgaacattaacattattttaatttttacataagaaatgtttataatttattttattttttaaccaatgaacaattttttttatagatctttaatacttagtttttttctttccaacgattaattttaaacaaaatattttaatactattcaatcttaaataataataataataataatttcattaatattttattgaaaacatgaataaatctaattttgaagattaaaaacacgaagtgaatttaataatgacctatctaatgagtgtagctcatttcataatatatgttgagtttctgatgtgatgatttgagtttgatcgctttagaatacatccttagaaaaaagtaaagaattttaattatgattaagttttggactcagaattaatcctataaccgagctgaaacttgtagggatttctcatatatcccacgataaaataaaatattaatcctatagctgagctgaaacttgtagggatttctcataatcccacaagaaaaccaaatattttaattatgatggttaaaaaaatatattttatttttatttttaaaagaagataccagttgaatatatcgattacaaaatattcaataataattgaatgataaaacatacaattgcaatgcacatacactgtttaatataagcaaatattcattttatataattnnnnnnnnnnnnnnnnnnnnnnnnnnnnnnnnnnnnnnnnnnnnnnnnnnnnnnnnnnnnnnnnnnnnnnnnnnnnnnnnnnnnnnnnnnnnnnnnnnnnnnnnnnnnnnnnnnnnnnnnnnnnnnnnnnnnnnnnnnnnnnnnnnnnnnnnnnnnnnnnnnnnnnnnnnnnnnnnnnnnnnnnnnnnnnnnnnnnnnnnnnnnnnnnnnnnnnnnnnnnnnnnnnnnnnnnnnnnnnnnnnnnnnnnnnnnnnnnnnnnnnnnnnnnnnnnnnnnnnnnnnnnnnnnnnnnnnnnnnnnnnnnnnnnnnnnnnnnnnnnnnnnnnnnnnnnnnnnnnnnnnnnnnnnnnnnnnnnnnnnnnnnnnnnnnnnnnnnnnnnnnnnnnnnnnnnnnnnnnnnnnnnnnnnnnnnnnnnnnnnnnnnnnnnnnnnnnnnnnnnnnnnnnnnnnnnnnnnnnnnnnnnnnnnnnnnnnnnnnnnnnnnnnnnnnnnnnnnnnnnnnnnnnnnnnnnnnnnnnnnnnnnnnnnnnnnnnnnnnnnnnnnnnnnnnnnnnnnnnnnnnnnnnnnnnnnnnnnnnnnnnnnnnnnnnnnnnnnnnnnnnnnnnnnnnnnnnnnnnnnnnnnnnnnnnnnnnnnnnnnnnnnnnnnnnnnnnnnnnnnnnnnnnnnnnnnnnnnnnnttatataattcttattgatacataaatttaaaagttaacaagtaacgttataataataataataataataataataataataataataataataataataataataataataataataataataataataataataataataatagaactatttattatttataacactcaaatagaatattataattttattattataaattcatatattaaatactgctaaatgaaataattatggaaaatttttgggtaaaaattaatcatgcgtattatatcttatgtctaataatcaacacggatatcatattttttaataagagaatttattaaaaattattaaattgttcacattaatcatatttgttatataactttttgataattgtaagttaatactatatatttaaaataaaaatattatagaaaaagtcatatatatatataaatactataaatctacaataataacatttaatactatattaatagttatgctcaagtttatttatttttaaaaattaattactttgaaatacatttcaataataatatcattaacctttgatatttcccaatccaaaaataacaatgggcaactataatgatttgagccaaatcaaggctctgcaccgacgcagacgacgcgaagaacacaatgttcttgacgctgctactgacagttttctctagtgcctcttcgtcatcacattcgcgttcgatgccccctagttgacattagttaattataaaaattaatttgaggttgaagcaaattgacggtggagagcgaaacgcatagagaaaacttgtgggttatgtggagtgagatgagagaggagagaaaaaattatttcattttcttaaattaactcttaaaatttgcataatatattaatttatactattattaatatatattaatattaataatattaacttctaatattaactatttctaatattatattgtttatttactagtagataatatatgcctaattttggtccacatttaatttatacattatataattttcattcataaaccaaacaaacacattgtcatcgttattctaatgttattgaagtatgcaagtggaggtttaaacttcattttcaatattttgttgatttttctcccatttttgcatgacacgttattgtcacttagtaaaatttgttacatgttatattgtttgggatccacaaagttgacataaccatacatgaagttcgaataagtatgtcagtcttttacttaagttctagtataaaaacatagacacatcgtccttatcagtcatgctacttagccgacaaattaataataaatatcttaatatttgaatattaatgataatgttaagacttctttatgaagttgcatgtacttaattatctataagagacgaattatctataagctacgatttatttactaactattttctacaagaattgttataccactgtaacaactcctacaatcaagaatccaaagctcctatcccacgctataaatatcatgttctatttcaccattttcaactcactcacttatttacttgaataaaaaggtgtttataattcgactgaaaagatcatgaaatctatattggttacattgatcctaatgttagtcaactccaaatttcgatcggtaaatacacatgttaacatctatattagataacatgtttgtgctacattaaaacaaaattcgttaaacttttaacggaagactaagagagacactcgattgtaaatagagcgtaacgaaagttttgtatacccaattagcacaattgttatttagggaccattatcaaacaattataatatttgaagaacgaaaatgcaactaaacctataaattgatattaataattgttaatgttaatattaatattaacattaattactatatttataaattttatgaagttatatagtaatagtaatattaatattaattactatcaacattaatcactaatattaatttatataactattactattaattattaattttaatcactaatattactatgaatattaattatgatgatgattatttataatattatattatattatattatattatttatttaattgtcgcaaatatatgcaaatcttatacagccatttaatttatatataaaatataattttcattcttatacaaacaaatatattggtttatttgttttatatgaaatgattgtccttaaataggtgttatcaagaggcgtgtgtatatttattaaatattttgttattaacaacaatcataatcactcaattcgtgattcagttacacttaannnnnnnnnnnnnnnnnnnnnnnnnnnnnnnnnnnnnnnnnnnnnnnnnnnnnnnnnnnnnnnnnnnnnnnnnnnnnnnnnnnnnnnnnnnnnnnnnnnnnnnnnnnnnnnnnnnnnnnnnnnnnnnnnnnnnnnnnnnnnnnnnnnnnnnnnnnnnnnnnnnnnnnnnnnnnnnnnnnnnnnnnnnnnnnnnnnnnnnnnnnnnnnnnnnnnnnnnnnnnnnnnnnnnnnnnnnnnnnnnnnnnnnnnnnnnnnnnnnnnnnnnnnnnnnnnnnnnnnnnnnnnnnnnnnnnnnnnnnnnnnnnnnnnnnnnnnnnnnnnnnnnnnnnnnnnnnnnnnnnnnnnnnnnnnnnnnnnnnnnnnnnnnnnnnnnnnnnnnnnnnnnnnnnnnnnnnnnnnnnnnnnnnnnnnnnnnnnnnnnnnnnnnnnnnnnnnnnnnnnnnnnnnnnnnnnnnnnnnnnnnnnnnnnnnnnnnnnnnnnnnnnnnnnnnnnnnnnnnnnnnnnnnnnnnnnnnnnnnnnnnnnnnnnnnnnnnnnnnnnnnnnnnnnnnnnnnnnnnnnnnnnnnnnnnnnnnnnnnnnnnnnnnnnnnnnnnnnnnnnnnnnnnnnnnnnnnnnnnnnnnnnnnnnnnnnnnnnnnnnnnnnnnnnnnnnnnnnnnnnnnnnnnnnnnnnnnnnnnnnnnnnnnnnnnnnnnnnnnnnnnnnnnnnnnnnnnnnnnnnnnnnnnnnnnnnnnnnnnnnnnnnnnnnnnnnnnnnnnnnnnnnnnnnnnnnnnnnnnnnnnnnnnnnnnnnnnnnnnnnnnnnnnnnnnnnnnnatatgataagaagaattcaacaagaaatttctcaagtaaattaaatgtatgaaaatcttgtaattaaaaaattacaaaattatgagtgaaattaattaaataaggaatagaatctacacagatttatgtctttcaataaattattgaaaaacataaatttattgaaacattaaaggtgttttaaagtatataaatttctaaaacatttcctaaaattatttttacaaataagtaaataatgagacatagaaattaccttttccccaaaattaatgtaatataaggtccaaatttcgcatttgacaactaatgctaataagcctatttgtcttagaacctaggaatcacaaagttcatcatgttagtgaaggcaaaattatcacataaaatacgaaactatccctgacatcttataggtgaccttttctcattggctacactacccttatagttcgagtcacactattcactttgccaccttttgttcctctatcagtgaatgcattattttggattctcactttcctaccttatagtcattcttttcgttgttgtcatcattgcacacaaaaaaagtaatttctctttgtagctgtgctagttacaaagcgttttaaggtttcatttcgttgatgggctttggttggagttaaagcaatctcaccaaaaacactacaaaaaaactgaaatttctaacggtcaaaattcgtcgttaacattaaaaatctgtcgatagctttaaattttcaatggataaatatctgtcggtaaaacagttgtaggaaatttaaccaacagatttttttggttggtccgttaaaaatttccaacaaaaatatccgttgataagttttttcagaaattagcgttggtaatttctgaggaatgatccgtgggaaattaccgaaacatccgtcggaagtccatttgcgggatattattgacgaacttttccgtcgataacttatgttcaaaaaatttgtatttaatttttttattaataaatttttttacttatattatttaatgtaattatagaaattaacacatacatgtaattaataaaatactccaattcataaatccaaaacaaatgttaaaacaaattgagttaaattcaaaataagtctaaaataaaagcaaaatgtctaatatgtcaatagtaattttgtgttgttaagtcagtcatcaaaatagtcattgccatagtgcctctactggtcatcgtgttgttgctagtcatctgcttgttggtcattgttttgttgttgctggtcatgttattggtcattgtcttgttgctgctactggtcaggcggctgctgttgctcaataatgttgcgggctttaggaagtagaaaatgaagtacaactgattgaaatacatgcatctgctccttcgattgatgaagctcctcttttgattgacgaagctcctcctttattcgattaatcttcgctgaatcaatcgcgtgattagaatatccttacaattgttgcatgaacgtgtcatctccacatttataagtatgagcaagatctctagtactgtaaaggcgtcccttatgctttggtcccgtagctgcaacccaacaccgagtcctaagtctttgttcttcagtagggtctaaaggagtcatttcagattcaccaacacttgattgaccatcagacctagtttgagataatctagcctcaaaattttcctctcattcataaacaattattatttattaaatataataaacatttttaaaaataaatatagcatgccgaataatggcctcacatgtgtctgcttagatctatcatcgaaaaattcaccagtatcctttcataaatgagtttgttgaaaaatctcatcaacgtatatagatcgaccaagttcctaaggctatttacaaacattataaaataaattaaacataaccagagaatgatacaagtacaaaaagtggccttatcataattttaacatgatcttaccaagtgaatggtgtgatcttgcaaggtaatagaaccacttgtgtgcatacacctaccttttcagatgcccaattttttttggtctgttgacacttggaatgatactcaggtgcattccaatgtgataacatatcattccagacacgatctccaatccaatatgaccttttattttcatttcgagcatccctaaacatctcagaaagtctatgagagactttcaagttaaaagcttttttaattcctcaggtctccataccaatttcctctaaagtaacacaaagttatgaaattgcacatagttacatcaataccaattttacaaaattaaatgaaataaaacaaaatcagcattaattggaactgattttccagcacaaatgaatgattttaaatatagagcacaattgaatgcaatattttttcttccgatagcaaaagcatttctcaatttacaaaaaaaaaatcctaaatcatgagatatccattttaggcattgaagtaattcattaagagattaataagttaacttaaaacgttggaaaaagagttcttgataatcttttggaattgctcaccatgttgtccatgggttaacaaattgttgtctaatggacaatgtgatagtctttgccgcaaccttagatggatgaaaccttaatagaaaaaataatttgtccttgaaaaattaaaacataaaatgatgtatgatatataatgattaattatgtaaattgttaatacttgcgttccattgatcagtgtaatcgtaggacgatcattgattggaagggtcttccatggccaaatttggaatatcttcatcagtaggcatgttccctacagcgggggatggggatggtgtgaatgtaggcaccgggggcggtccaattgcactaattggagatcgatggagatgatataccttcagttggaggtggaaatggtgtaggtacaacatccgaagatctaattggcatagatacagtagataaggatgaggtagatgatgacaaactatctctaggtggtagtagtctaaccacatatcgtttgttctttccagttgtccgtttcccattattgtcatgtgacaggggtcgaggaggatcaataccacctgatgacatatctatatatacaaaaataattttacaaataatgaatcaaatagtatgggatgaattaaaattagatatgtaacataattccctttgacacaaaaaacaaaatactctaataaagtgttcttcctttacaacaaaacaaagattagtaatatggaagataaatctttaacatgtctctaatgactttctgcacttccatctcttccgtctgtcatctaacaaatatgggtacaatattagcttttccatcgaaagaatcttcaactctctctaaatctaaagagtcttcaagtctgttagcatccataaagtcttcaaaatctattatgctgtcttagcatcatgtgaccttccaattacaagtacagtgctctaatcaactgagctactagaacattcatgttaaaagttaattaatattactatatataacattacaaattttaatgcatatttaatacacacaaatttacataataatttttataacaattaatttttatctaataatatttttttacatatataaatttctaaagtatattaacctaagattttataaaaattaaattttctaatgtatatgaacctaatatttttttattaaaacctatgatttttaattaaaccatgatttttattttaaatttattgttgtaaaatatgcattattagataaaaaatatattattagataaaatnnnnnnnnnnnnnnnnnnnnnnnnnnnnnnnnnnnnnnnnnnnnnnnnnnnnnnnnnnnnnnnnnnnnnnnnnnnnnnnnnnnnnnnnnnnnnnnnnnnnnnnnnnnnnnnnnnnnnnnnnnnnnnnnnnnnnnnnnnnnnnnnnnnnnnnnnnnnnnnnnnnnnnnnnnnnnnnnnnnnnnnnnnnnnnnnnnnnnnnnnnnnnnnnnnnnnnnnnnnnnnnnnnnnnnnnnnnnnnnnnnnnnnnnnnnnnnnnnnnnnnnnnnnnnnnnnnnnnnnnnnnnnnnnnnnnnnnnnnnnnnnnnnnnnnnnnnnnnnnnnnnnnnnnnnnnnnnnnnnnnnnnnnnnnnnnnnnnnnnnnnnnnnnnnnnnnnnnnnnnnnnnnnnnnnnnnnnnnnnnnnnnnnnnnnnnnnnnnnnnnnnnnnnnnnnnnnnnnnnnnnnnnnnnnnnnnnnnnnnnnnnnnnnnnnnnnnnnnnnnnnnnnnnnnnnnnnnnnnnnnnnnnnnnnnnnnnnnnnnnnnnnnnnnnnnnnnnnnnnnnnnnnnnnnnnnnnnnnnnnnnnnnnnnnnnnnnnnnnnnnnnnnnnnnnnnnnnnnnnnntatatgtattaaatatgtattaaaatttgtaatgttatatataacaatattaattaacttttaacatgaatggtctagtatttgaaaaaaaactggtataagaagcattactctttttgttattgtgcctgcttggatgaacttttttgacaatataataatatgtcaaatgcaacatcataaacattttttttttatttctaaatcatcaaatcatatagtaaataatgattgagttcattatgtgtaggcataattcgaaaagctcgagttgttatggaatgtatgcattgattttgcaaagaatgcattgagaaatcaatgcgccttaggtttgttctcaaactactacctatgttattatctcacaaatttatagttgggatactcttggtttattatgacatgttctaacgaattgaatttggattggatttactgtagtaacaatgaatgacctgtttatcgcacacatgttgctagttgtcggtcattgagacatgaccaaaactttgatactctaatttctcttttgtatcctgacattatatagcatcttggattttaaaatatatttaaaaactcatgaacatgttttttttattaggaggaattgacattgcatgaggatgggaggactcataattaagaggtaagagtttgctcaaacatttttcaaatatatatggatgtttataaaaaattattctattggttattcttgttgaatcacaatacaacttatgataggtgaaagctaatttcttgattatcaaactacttttgtttttggctaacaattcacttttatgttataaaattgagtgctctttcttgaacaagaagttttaggagctattctctcttattgagatacatgactttttttacattaagtatatcatttnnnnnnnnnnnnnnnnnnnnnnnnnnnnnnnnnnnnnnnnnnnnnnnnnnnnnnnnnnnnnnnnnnnnnnnnnnnnnnnnnnnnnnnnnnnnnnnnnnnnnnnnnnnnnnnnnnnnnnnnnnnnnnnnnnnnnnnnnnnnnnnnnnnnnnnnnnnnnnnnnnnnnnnnnnnnnnnnnnnnnnnnnnnnnnnnnnnnnnnnnnnnnnnnnnnnnnnnnnnnnnnnnnnnnnnnnnnnnnnnnnnnnnnnnnnnnnnnnnnnnnnnnnnnnnnnnnnnnnnnnnnnnnnnnnnnnnnnnnnnnnnnnnnnnnnnnnnnnnnnnnnnnnnnnnnnnnnnnnnnnnnnnnnnnnnnnnnnnnnnnnnnnnnnnnnnnnnnnnnnnnnnnnnnnnnnnnnnnnnnnnnnnnnnnnnnnnnnnnnnnnnnnnnnnnnnnnnnnnnnnnnnnnnnnnnnnnnnnnnnnnnnnnnnnnnnnnnnnnnnnnnnnnnnnnnnnnnnnnnnnnnnnnnnnnnnnnnnnnnnnnnnnnnnnnnnnnnnnnnnnnnnnnnnnnnnnnnnnnnnnnnnnnnnnnnnnnnnnnnnnnnnnnnnnnnnnnnnnnnnnnnnnnnnnnnnnnnnnnnnnnnnnnnnnnnnnnnnnnnnnnnnnnnnnnnnnnnnnnnnnnnnnnnnnnnnnnnnnnnnnnnnnnnnnnnnnnnnnnnnnnnnnnnnnnnnnnnnnnnnnnnnnnnnnnnnnnnnnnnnnnnnnnnnnnnnnnnnnnnnnnnnnnnnnnnnnnnnnnnnnnnnnnnnnnnnnnnnnnnnnnnnnnnnnnnnnnnnnnnnnnnnnnnnnnnnnnnnnnnnnnnnnnnnnnnnnnnnnnnnnnnnnnnnnnnnnnnnnnnnnnnnnnnnnnnnnnnnnnnnnnnnnnnnnnnnnnnnnnnnnnnnnnnnnnnnnnnnnnnnnnnnnnnnnnnnnnnnnnnnnnnnnnnnnnnnnnnnnnnnnnnnnnnnnnnnnnnnnnnnnnnnnnnnnnnnnnnnnnnnnnnnnnnnnnnnnnnnnnnnnnnnnnnnnnnnnnnnnnnnnnnnnnnnnnnnnnnnnnnnnnnnnnnnnnnnnnnnnnnnnnnnnnnnnnnnnnnnnnnnnnnnnnnnnnnnnnnnnnnnnnnnnnnnnnnnnnnnnnnnnaatgacaattataaacgtgataaagaaaaaggtgtttggatcgaaatttgagtttagaaaagaagcggggattaaaaaaaaaaattaaaaggtttagaaggataatgcagtgaataaacttaaatgaaaagaaaattgattattggttggtgaatacagataatgcaatctcagaagatagccataagtgtgagacatgaatgatgtttacaaaatttgagtgtaaatgattcaagcggcaagcggcaagcggtgaaaaatggctaacaagtctcttattaacagatttttttttttattttaatgattgaatatcatgattttgacaagtgtacaataagttacatcataacgataaataaatcttggttatcttacttggaggatcttaacgtggtggagctatcttcatgccataaacccttgtttcattgtttgaacttcacctttccgattccaaatattctcgaaatttaaacattttaattctttgcagaaggcttcaggactaaggaaataacgacagaagatacttccaatcttagaccattttagaagtgtttttgaaaatcttttattaaaaaagattttatatttcagtagaaaaattctaaaaaatacttataagctatatctagacagatgtaaaagtcaaaataggtaacatataacctccattttcagtttgatccttatctttaattttacaaaatacttattcttgtattcaacagattcggaactttctactcatgttgcaaattcaatagctgaaattggcaaaaaagagaagcatgataaaactgatgtaaatatgaacaaaattaactttgctgaaaaggaaaatgctggatatcagcaattagaatccgaagcttcttttgtcaaaacaaaaggttctactccaaaggagaaacagaagattgaaactgaaggtcctaaatttggagagaaaaatgaccaaaatgataaagcagaaggagaaggaagagaaaagaatgaaaccatgtaggaactagctgtttctaaaactatcttatcttctcatgagagaaatatcgaaaacgttgattcgacaaaagacaatggcttttctattgaagagttgggattaagggaaactgatatttgatcaacaagagctcttccttttcgagcacctgactctagtttgaataaacctaccctggtcaacgttgatttcaaaaaggatgttgagaatttcaagaggttggcttatgaaggagggtttgaatttgctttatctaaagctgagtataaagcagaaatcaagaaagcagtagatgcggtggagaagtttgaaggtcttgttactgaagggctccaagaagaaatgaatgcctttgttgaaatcttcaataatgcttatgaagctcgaaagcaaatccaacaatatacaaaaagatatagaggaaatcgcaacctaagaggatagagaaaaactagccaaggctagagttgagtacaaaaaagtagaagatctgatcagtcaattcgaaaagcctctagctcaggcagaaagttcagagaacgaactggcggcacaagaagaactgttggatcaacttcttcctattcaaaacaaattgaaggaagttcaccaacaaattacagacattcgaagccgaatgagaaacaaaaagaaatgttcttttcggcacactattagaaaaataggttttaacatcgccactttaacatcgatttttgagaaaactgatgtgatagactcccgaactgattcaagtcctgtttgccctgatcttccttgtaatggaatcaattcttcaattgaaagaaaaatagagtatgaaatgctctgttctaggacaactttttaggctttgtgatttaagaattggattaatggaagaagactagaagtggatttggattgacaccatggaataggaattccaataagtcttgcaagaatcaccacaatagctcataagctattgataagaaacaataagttcttcactaagaacaagggaaaataactctcaacctctcccacacaaagtgcattccaatttcattccaccaaaaagtccttacaatctgttctgatgtggtttatatagaccacgaaactacaagctaaataaaatgtaaatggatcctaaatgaaatccaaatgtagcttccaagacaagcttctaaaacagcttttaaaaactaaaaatagcgcttttgcagaaagaacgaccttaatcgattatttcgtattggtaatcgattattttgaatcaaataatcgattactagatcttggtaatcgattatttgttcatatcaggcctggaagctgattcatgaacaaagtaatcgattatttcaccaaataatcgattatcacaggaactcccacttccctgtaatcgattacaagacgaaataatcgattatcacaggaactcccacttccctgtaatcgattacaagacggaataatcgattacagtagagctatttacaaatctaacatttatacaaagtattgaatcggttacaggctactcgtaatcgattacaatagataagctcaatattttatagccttctttatgattctccaagagatataagctggattgtatatgatcttggagtgtttgaaccctagcccttgtcattggccctttaatcaccaaaggaagtgcttccatgtgtaattccaagtcttccttcacttgccttggttttaggattgtatcatcccctccttcttgaaaagaacttgtcctcaagtttatttcttcatttggacctgcatcatacaaggaaagatcaccaacattaaaagtattactaacaccatattcattaggcaattcaagtttataagcattgttgttaatcttttccaaaatcttaaaaggtccatctcctcttcgttgaagcttggatttcctttcatgaggaaatctatcttttctcaaatgaagccacaccaaatctccttccttgaatatcatttgccttttgtgcttattggcttgcttggtatacttttccattttcctctccacatttgctttcacttgttcatgcattttcctaacataagaagctttagacaaatcatcatgattaatcatagaagatgtgttaggtaatggcaataaatcaagaggagttaaaggattaaagccataaacaacttcaaaaggagacatagaagtagtactattaactactctattataagcaaattctatgtgaggtagacattcctcccaagatttcaaattactttcgatgtagcatctaagaagctgtcccaaggtcctatttaccacttcagtttgaccatccgtttgtgggtgacaagttgatgaaaataaaagtttagtaccaagcttaccccataatgttttcgaaaaatgactaaggaacttggtgcctctatcactcacaatgctttttggtaatccatgtagtctcactacctccttgaagaaaagattagccacttcacaagcatcatcacttttatggcaaggtatgaagtgtgccatctttgagaacctatcaaccacaacaaaaatagaatcctttcctctcttggatcttagaagaccaaggacaaagttcatagagatatcaatccaaggagagttaggaatgggtaaaggtgaatacaaaccatgaggcatgaatttagatttagctttatgacaaacaatgcattgagaaataaatctatgcacatcatgcttcatttttggccaaaagaaatgttcatgtaacatggccaaagttttatccaccccaaaatgagccattaaattattttcatgagcttcttttatgaaaagttctctcaaagaacttttaggaacacatagtttcttttctttgaacaagaaaccatcatgtctaaaatatccttgatgacccctttctcacacaaagcaaagatactagagaagtcattatcacttacatacagctcctttatgtgattaaaaccaagcaatttagtctcaagcatagaaatcaagcaatgccttcttaaaagggcatccgccactacattcaactttccttgcttgtgtttaatgacataaggaatttttcaatgaactctacccacttagcatgtctcttgttaagtttaccttggcttttcaaatatttaagagattcatgatcactatgtatcacaaattccttaggtaaaagataatgttgccaagtttgcaaaactctaacaagtgcatacaactctttgtcataagtggaatagttcaaacatgcaccctttaatttctcactaaaataagcaatgagatatttatcttgaattaaaaccctcccaatacctacgttagatgcatcacattctaattcaaaggaagtattaaaattaggcaatgcaagaataggtgcattagacaacttatccttcaatgtttggaaagcattctcatgctcttgctcctaagaaaagttcatggtctttttcattaaatcattcaaaggagaagcaatagtactaaaatctttcacaaatctcctatagaaactagctaaaccatggaaacttctcacatctttcacattctttggagttggccactccatgatagctttcactttctcttgatccacttggactccttgagcacctactacaaaacctagaaacacaacttgtgaagtgcaaaaagaacatttatcaattgctccatacaatgtttcctttcttagcacctctaaaacatccttgacagcacctctaaaacatccttgacatgcattaaatgatcatccaaattagcactataaacaagaatgtcatcaaaatatactaccacaaatttacctatgaaatgtctaagaacatgattcataagtctcatgaaagtacttggtgcattagttaaaccaaaaggcataactaatcattcataaagtccaaattttgttttgaaagctgttttccattcatccccttccctcatccttatttgatgataaccactcttaagatcaattttagagaaaacagtagcaccatgtaattcatctaaaaatcattaagtctagggataggatgtctataccatatggtgatgttattgattgccctacaatctgtacacatcctccaagtcccctccttcttagccacaagaatgattggcatagcacaatgactcattctctcacgaatccatcccttctcaagtaacttctccacttggttttgaatttcctttgtttccattggtgaagtcttgtaggctagcctattgggaagtgaacaacccgaaatcaaatctatttgatgctctatacctcttaaaggaggtaagccatttggaatttcctttggaaaaacatcttgatactcttccaaaagagattgcatagctttgggcaacctttcaccttgtttttcaacatgtaaacaaagagagttaggaagcatataataaagaggttgttgagccaagaacactctcttcacttgcttttcactcaaaaataagctctcttttatctcatgaatttttttgttactattttctttttcctttctttttttctcactagatttccctttttgtacaacaccttttttttcttttcaagttcagtaatttttttcaacttttttactctcttttctttcatcttaatttgatcctcacacacttgtctaggagtcaatggtctcaaaataattttcttgcctttattctcaaactcaaaagtattttcttgccatcatgtacaactttccaatcatattgccaaggcataccaagaagaatatgtccagcctccataggaacaatatcacaaagaacattatcatgataagcattaataaaaaaaggaatgaacacttgagaatttaccaccacttctccactttcactaagccattgtagcttgtatggctttggatgttttgtggttggcaagtgtaatttctccacaattcttgtgctagctacattagtacaactcctaccatcaatgatgagtaaacatactttgtctctaaccaaacatcttatgtgaaaaatattttctctttgattctcctctttatctaggcacaaattactcaacattcttctaaccattaaaagatctccctcttcggcctccacaaatgtaagggccttttctttctcacttgaagaactagatgcataacttgaggattcacttgtgatctttacatcctctagcaaagtcatagttctcttattaggacattgagaagcaatttgtcctctccctagacacttgaagcatttgatgcttccagtttttgttggagttacttgttcaatctttttagttggcttttctaccttcttttcttttaacttgagaacgctccccttttggcttctctctccaactagaagttgcagccccactagacttggaataaggaattttcctccttttcatttgttgttccaccctttgagctttatgcactaggtcctcaattgtgttataagaatatagctccaccacatcttgaatttctctattcaagccatgaataaacctagccatagtttcttctttatgttccacaattccagctctcatcatcatcaactccatttccttgtaatactcatcaacactcttggaactttggaaatgtctttgaagaagattgtgaacatctcttgaataataagctggaacaaatctacccctcaaacttgctttcaaatcttcccaagaatttactctttgccttcttcccccaactatatctctttgaatgtggctccaccactctaaagcataaccaccaaattctatagttgcaagagtaactttcttgtcttcctcaaaatgttgacatgagaaaatttgttcaaccttcatttcccacccaaattattcattaagatcattagtgccaaggaatttttattttgattccacccaatcctccattcctctcatctccatcctcctatcttcatcttctctatgttctctcctcatcctcctaggataatgtctcctatgattttctcttctatcatgttgtctcctcctctcatcatagtaatttcctccataagaagaagcataatcactcccccttctactaccatcatccaatccatccacactacccatggaactactctttcttgttttctccttttgcaactcttcaaattttgcatccattctagtttgcaatttctccatttgcttagtcatggctctcatcaacctagaagttttaggtgacaagacatctcctccacttgaactcatccttcaaagaatttgttagcaaaacacaagtatatataaggaattcctcaccactctctaagtgtttaccctcactctcgtgtttgcacactttcaaggctttttctataatattctctcttgcctttttccactcttattctctctttagttcttaggcagaaacttcaaatcaaatcaagcctctttgctacagtgaaatatgaaatgattctagacaagacttaagagtccaaagaatagaaaacttctaagacaaaacttttggaaatttaaagagacaagcaacaaagcacaatttagaaaggactactcaaattggaatttatgagacaactcaaggaatgctatagtttttataaacttcacaataaagatatgccaatgaattcaattgttgaaagacatttcatcaattctgaatgtcatacacttttacttgtttttgttgtttaagcaattttgaaaacttgtaattttgtagcttgcttctagttttctgttttccagctacttttcactatttcttttgctttctaataacacttgatgcaatttttctctttgtttttgtttttctttttgtttctaacacttgctccagatcaagcacggaattgaaatcaaaacaaagtattacacagcacaacaacaatactaacataaattgacaagaatcaaagctagaaattagggaaactatgaagaacacaggaagaacatgagaaatatgaattcaaaaggaaacttgaagaaaacctagggtttttgtaacacaacacttaacaaagctacaacaataagaatcacaagaaaacatcaagaaacaaggaattactaaggatttttgtttttgactctaatgcagaattttacctttgaagaatcccaaaactaaaattgaagaagaattccacaaggtttaagctctagataccaaatgacagactcctgaactgattcaagtcctgtttgccccgatcttccttgcaatgggatcaattcttcaattgaaagaaaaatagagtatgaaatgctctattctaggacaactttttaggctttgtgatttaagaattggatcaatggaagaagactagaagtggatttggattgacaccatggaataggaattccaataagtcttgcaaaaatcaccacaatagctcataagctattgataagaaacaagaagttcttcactaagaacaagggagaataactctcaacctctcacacacaaagtgcattccaatttcattccaccaaaaagtccttacaatctgttgtgatgtggtttatacagaccacgaaactacaagctaaatgaaaagtaaatgcatcctaaatgaaatccaaatgtagcttccaagacaagcttctaaaacagcttttaaaaactaaaaatagcgcttctgcagaaagaacgaccttaatcgattatttcgtattgtaatcgattattttgaatcaaataatcaattactagatcttggtaatcaattatttgttcatatcaggcctggaagctgattcatgaacaaaataatcgattatttcaccaaataatcgattatcacaggaactcccacttccctataatcgattacaagacggaataatcgattatcacaggagcttccacttccctgtaatcggttacaagacggaataaacgattacagcagatctatttacaaatctaacatttatacgatgtatttaatcgattacaggctactcataatcgattacaacagataagctcaatattttgtagccttattcatgattctccaagagatttaagctgaattgtatatgatcttggagtgtttgagccttagcccttgtgattagtcctttaatcaccaaaggaagtgcttccatgtgtaattccaagtcttccttcacttgccttggttttaggattgtatcacgatgttaatgaaaacgcggtggcaaattcgtaattaaatgtagttggttaacatcagttttcttaaaaacctggaaaaccgatgttagcgtcttcctgttgtcaacggtgttaaatctggttaatgtcaaggccaaatatgggtggagtgacaaaagcttcagttcaccgcttgaggtagttaaggacatgcttccagataagaacacgttgccaagaagttactatcaggcaaaaaagattctttggctgatgggtatgaagtatcagaaaattcatgcctgtcctaatgattgcatattgtacagaaatggatttcaagaaatgcatagatgccccaggtgtggggtatcagggtacaaagtgaaggccgatgacgactgtagcattgatgaaagcacaaagaaaggcccccccgcgaatgtgttgtggtatcttctgattatcccaaggtttaagtgtttgtttgctaatgaagatgacgcaaaagaccatacatgacatgcagatgggagaaactgtgatggaatgcttcgccatctagtagattcctcccagtggaagaagattgaccgtttgtatccagaattcggcgaagacctaagaaatcttaggcttgcacttgccagtgatggaatgaatccctacggcagtttaagtactcagcacagttcgtggcctgttttgctagtcatttacaaccttcctccttggttgtgcatgaagcgaaagtacatgatgttgtctatgatgatatcgggcccaagacaaccaggaaacaacactgatgtttatcttagtcccttgattgaagacttggcaaacttatgggacgagggggttgccgtgtttgatgggtatgtaaggagacattcaagttgcatgcaatgctattttgtaccattaatgattttctagcgcatgggaatttgagtggatacagtgtccagggccatcgtgcatgccctatctgtgaacaagacacaagctacgtacaacttaaacatgggagaaaaaccatctacactcgccatcgacgttttctgaaaccttatcacccttatcgacgaatgaaaaaagcattcaatggaagtcaagagcatgaaactgcaccgattccattaaccggtgagcaggttcttgagtgagttgagggcatccatactgtatttggaaagactcaaaagaagcagaaaggtaatacttgcatatggaagaagaggtcgatattgtttgatcttccatactggtctgatctagatgttagacattgtattgatgttatgcatgtggagaaaaatgtgtgtgacagtttcatcggcacactgcttaacattcaaggcaaaacaaaggatggattgaacactcgtcaagatcttgctgagctgggtatacgtgagcagttacatcctaggtctgatggtaagaaaatatacttgcctctaggcaagatcttgacgagtgaaagtgccacaaggatactcttcaaatattaagagccttgtgcagatcaaagatctgaaactagttggcttaaattctcatgattgccacatgttgatgtaacaactgttagctgtggcaatttgagacattttgcctaacaaagtcagacatgctataactcggctgtgctttttcttcaatgccatttgtaccaaaatcgtggaccctgtaaagttagatgacttggaagaagaggcgacaattatcttgtgtcagttagagatgtattttcctccttctttttcgacataatggttcacttacttgttcatctggtcagagaaattaaattctgtggtcctgtttatttacggtggatgtacccagtagaccgatgaagatcttgaaagggtatacaaaaaacctacaccgtcctgaagcatccatagttgaaaggtacattgcagaagaagctgtagaatttttttagagtaccttgaaaaggcaaaacctgttgggcttcccgagtcccgacatgacgacagagtgggaggaatgggttcacgagggctgcatgttataacgcttggtttacaggaattgcaacaagctcatttgtatgtcctgaataatagtaatgaagtccagccatacatagttcgtgatgaagccttagtcaaggaaagtaatccaagaatgacgaagaataggttgttgaaagagcataacaagactttcctgaattggtttaaagatacaatatttagtgatgaatctttatctgaaacaatgaggaagttagcagatgggcctaaaagaaatgttagaagttggtagggatacgatatcaacaaatactggttctacaccaaacaacaagatgacaagagcacaatgcaaaacaacggggttagccttagggctgagtcgcagcacttcacaactgtgcatgaccacaatccccatttggcgtccatgccttactttggagtcattcatgacatctgggaggttaattatgttacattcactgtgtgtattttcaagtgtaagtgggttgatatcaatagcggtgtgctgaccgagtactcgggatttactttggtagattttaacaagctagcttatcaagatgaacctttcatcatggcagaacaagctaaacaagtgttttatgctcaagatccgtttgacgaaaggtggtcagtggtactacatggaaaaaccactggtattaatgttgacgatgatgactcaaccgttgatacaggtgtcagtcaattgttgacacaaatacctaacgtcaacagagaagatgaagttgacgatgttcatacaaatcataatgatcaggatgaaggagaattaattaacatcacttaatgtaatttgttttcattatttacttgattgcaatttttacaatttcataagtaatttaacttgtcaactaactttacttatctttctttttgtttttaacaggatcatgactacaccattgagctccccttgtctgcctcagtcagtgcctcctcttcctaagttaggacctcctcaggctgagtcagcgcctcctcttcccgagtcaggacctcctcatcctgagtcagcaccttcgtcgtctatggtgaagaagatcaggaaagcaacacgtctgaggtcactatctaccagacctactggtgctcaaagaccagtggttcatatcgatcttgccactgggaaggcagatggtcctcaggcaaagaaattgaggacgtatctagggatcgtggttagagacaaggtcgatgtcaccattcctaactggaaggacgttcctgcagcttcgaaggagctcatttgggaggacattcaggtattactattaaatgtccaatctcattgcttgtagttatacaatttaaatgtgattgaaattgttaatcccacttgattgtaacgcaggctgaatttgatatacctgaagcgtccgaccaatgaaccaagaagaaaatactgtagacagttggagagcgatggaggcagtttaagtcagatctgacctccaaatgggttcttgcccaaggaaagggcgatgatgccaatgctgtctatgacaaatatagcatcagcaaggaacagtggcaaaaattctgtgagagtcgtagagctgctacatgggaggttagctgagttgaattgttttacaattccattgatatggagtctttcaatcgcatttgttttgacatctatctgtgtaattctgacagggtgttagaaagaaggctcaggacatccagaagatgaacattgcccctcacgtgttgtctcacgggggttacaaattgttagaaaagaaaattatggaagaaaaacaaaagaaacaattggaggaagcagcccgtgatgatagcacggaaaccatagttcatcctccatcccctgtgagatgacacgtcaagtggaagctggctcgcacgaaaaaaatgggagaaatgactactgaggtggcacgtgagattgcagagaggattgtaagtcaaattaaaaggatggttcctgtatatttcattaatgaataaatttgcctaacgaatgactaaactaagtttctacttattgtcattgcaggattccatggatgagcaatccacacagggtagctttgtccccagtggacgtcaggatgtcctgactctgcctttggacgaccagagcaccccgggcgcgtccgtgctactggagccggtgtgaccatcacacactacttcagattggctcaatcaacctctcgcaagtcgaagtcaatggcgcctgaagacttggatcgcctgaaagacaacatcagggtggagctggagcagttgattactgatcgacttacacagtcgatcattgaaagagtgacgcaacaaataatgatgtcattcaaccaattgcagtcccagatgcaaacccagatgcagtcttagggtgccatgccacctccagaggttcagtcatgttcttagtgcctgtgtcagcaccaagggaagctgtgtggatccctcggggaatgacccagacatgggtggatctgacaggcgtgggttgtatgtcgatgacaatcctcctcgcctgattgcttttggaagagtttatgaggggtccacgaccatgcacaacgtccctcttgccactgatcaggtcaaggtgagtgttgaggaagtttgagatgctgatgctcgcgtccctgtacctactgacgaggttcagttagtggggctgacccttaacactttccttgcttggtcgacatatcttgtacaacctattttgcataaggtatttcatttttgccttctttattctcatttacgaatgatttgtctcatataaagttaacccggtcgttcatttatggttgttaactgtgtaggataaccaagaaccccagggaccagcgaaacctgtacataagccagaacatattgttgatcccttgtaccagattgcattgaccatccccgatcttttcctcagacccatgcaggtgccatgggacccaaagattgttcagggtgcataatgacaacttccccttgtacatcaagcatgaggatatttctgagatcatccatgatggtcaatgtctgaacataaccgttatacaattgtggattttgtaagtcactttcaattgactaccgttacataactaattgttttatattgttgcataattgactttattttcaaaacaataggcatatgttgttacatagatagggacatcagttttccaaagaaaaccaatggtgttacatgagatcaacatcgattttcgttgaaaaccgatgttgtggtttatgttaacatcagttttctaaataaaaccgatgttgaagttgcagtttttacatttttttaggtttttatttattacatagcgacatcgatttttactgaaaaccgatgtggtatacttttcgttaacatcgattttcaaaaccgatgttaactttcacactttcaacatcgcctgattccacatcggttccgatgtggaatgtaaaaaataaccgatgttgaatgctgtctttctagtagtggcagctacttaccacgcataaattttaagagaacatttggaaaagaagagattttgaacaagctcaagtggaattagcaaatgcattatccacttagattgaggctcataatgaactcaaaagtcgtcagcagcccaagtcatcttcaaattagcttcaatctttagaagtttttttttttttaatatttttttaaatgacttgagatttgtctcaagttctaactcaacttgttcttcataaatatatttttttgtttactctggttattttgatttcagttaacactagtatataattcttgaagcatttccagtttataagaccaatatactgtttgtattaatctcgctattgcataagaattattagaaaatactttatcgatcttattggaccattccaatgaccatttttcataaattttagattttttatccttctttcttcattgattgtctcgatgtattaaaaatccaatagaaaatttgtttatagtaaatttttataataatagtataaaatgaaggttcttcatatttcataagattattagtttcgtaattgtttatggtagaaatttgttaaataattgaaatgtaattcatcattgttttcatacttgattcttatcaattacaaacaacttattttatttagtgtgacagaatcgtaattgtaatttttttattcaaattaacaattggtataactttcgtaattgatgattagtctttgtaagtaaatttgtttttagtaatttcttaagaaatgcttagattataagttataaatatacttattttgaatatagttataaaaataggtttttgaaagagttataagcaaatttaaaatgcaaagagacttgcaaagtaaattgttttgaaagtaaaccgaattgaaatgcaaccaaatataaattgacagaaatgtaaagtactttcgaaatgtaaattgggatcaaatgtaaaacaatataaaagttgcggagaagtaaagaacaagaaataaataagttcgagttcaaagaagaaatgaagattgaaaaaagtataaagtttggacaagaaatatagggaaaaaagattgcttgaaatgtaaattaatcaaagaaagaaattgcatgaataataaattgcattaagaaatgagtttgaacatacatgttatcccgataaccgctaaccattttccttgtgtggctgttggtgtaaaggtttctgtgatcttcgcaattgaggaaaaatgtttactagtgtgcctatttatagcctatttcgacccaacggtcaaattacaagatctataaaagtgtgtaatctaatttgaactaattatcccatattcggctacctatgtcttcgtgctttccatcagaaaaccgttagtaattgattttgcacttttgatcgaaataacatgcctttgatgactttgctcttcttatcttcaaggaacatctaatttcaacaatccatcttttgatgcagtttctactttctaagtcttgacgttttcgattattcatcaaactcaatccggttaccatattttcgatatgattatcatcttagcataacttcaatattatgttcttgtgcttcttatgattcctatacttagaaaaattcactaacacccctaacaaatgacacccaagaaatatgttttctaacttgtgagaatattcattttttgtaataacttcaaactggtgttttgttgaacacttattcaaacacaacaaactaaatacctttaatatagggataaatatgtaaattattatttccacgtctaacaccatttatcaaattgtgagataactaacttaatcatcgaatggaattctcggagacctcgaccacagtgccacgaattttaatattatttccctaaattcacgcgcacaatacatattaccagagtgccatgttacgtaattcgctacccaaggcagcgaaataggagagctgatgtggtgtaagactggtcaatgagccagtgacctgtaagaaacgggcaggacacgtggcagtgttggatacagggggagcaacatgaagattgtaaaggaaattgatcagtattggttttgagctttcaacatgcaaatggatgccttgaagttaaggattgtgtgaaatgtgtaagagaaaagcaatctagtgatccaagtgcattgcatacattcattcatgaataaactaattgatttttgtaagatttaaacaaggcttttgtaacgacctaaatttctacttattctttattaattttattcttacttaaagataaattttctaagaaacgtataatagtaaagattttaaagcgtaaaatttgcaaaggatttgctactcgtatacatagccaatgtctctaatacaaaagtttagataatacaattttctcaaaaaaaaaaaaaaaatccagcttattacatatcttcgtttatatttcttcactacttcaaggcttcacggaacctgtccatcattgccatctaaaaaaaacatgaaacaattcgggtgagaaataaatttctcagtaggcaaagctaaatcccgaccctatcattaggttagtaaaatcataaaaatcaaacacatccacaagcaatatgcaaactatatgaattcatgagatgaactatcccatggcaaatggctcccacatatcgtactgtatgtggccacgctgagcgtggtcgctgctatagtcttacgcaaacatgcatgaattttgccatatatccttgcccatgggtactacatatcgtactgtatgtagcatcagattctgtttccccaaagcctcgtactggacttggaaacatgaatccacctatcttaatcacatcaatcatacatatgaaacaatcaaatgcataagtaaaacatagatcatatcatcatatatatcataagtatggttataccaccatatcttatccaataagcttttataagtatggttacaccaccataccttaattaagtaagattattcccaaacttatgcataaccagagaaataaccttaactacagaaaaattatgttagtagtctaactaataatcctcaatataaataatatctaattcctttaaacctttacaagtaaagattcacatctagtatacacactaattaatcttcaaaatcaaataattaatccttaaaatcaaatcatcaagtatttaaaccattcaactccacaccattcatcctctacttcaaaaattaaattacaacatatccataaaaatataaacagacaatccaaaacatcattaaaatcaccttaaaagatcatcaaatagacttccatacttcactaatattgatgggtataaatcataacctaacttatgacttgaatcaacatattcttatcaaagaataaccattaaacatcacaaaattcaagcctaaaatcaaccatgaatcagcctactaaagcatacaaattaatccaaaccattgattaactaaagatttaagcttcacctacctcaaatgagtttgagtcttgatatccttctaagcttgttaaatccttcctaaggttgtttgcctctacacgtgatttcttcaaggtgatggcttgatttaagctttgaagggaaagatgaaatgaaatgaaagtggtgtgagggagagagttcacgtgaggtttggagaaaggagtggttttgggattggtttgcacttaggttcctcctcctccctttatatagtgttgaagaaatgattacttagagaaaaatctcataagccatcattattcttttacaagtgtccctacacttgttacaatcttaaggcttccttcttttcttccttccaagtgtcctatcatttggcatgatcttagagcttcttctcctttgcttccaagtgtccaaaatcatgaagtttctccattcctcttgtattttcgtggagtagctcattcttgagtttttcccaaacctgttttattaaaattttatttctggactctttaaccgttggatctctttaaaattttgaaggtacactactatcttacatatgtaacttttgaccgttgggattgttgaaataatgtctacaactgtcctcgtgcaagatggaagagtgtagagaaatcttggcttgatttttatgttaccttgcatctatgccatacaagtgtcatgccacttgtttctatcatgtggcttgctttccaagtggcttatcatgaagtttcttgcctcttttacatgttttctcacgtgaatgaccaatctaaagggaaggaataccaatttttcttcctttcatgccacatgtggtcatttttgatgatgaataaaaatctagtttcaaagaaattcaatttaatttgaattcttttatctaaataaaattttgaattttagaattctagatgttcctaagaatttatgccaatgatagattaaattaatcctaagcagtcttatacagggcaatacataaacctttcattctagactacatcttgatcttgattttgattggtctatacttcttctgaccatcaaatttactaaaccattttattaaataggtctattcatcctataattaagagaaaattctatagatttcatgtatcatttttccatatttttcttatgcttgagttttcttgaataaagcctcaaagttgtcattttctaaaatttgtatgaattttattctagaattttgtgtcataaaatttgttgatacttagtcagttaagtgtattctataatttcatcaagtttctacaaaatttctaaagttatttgagcatttttagcctaggggcattttggtaactatgccattcaacctaggggtattttggtcattttaaaaaatgtccaagggtatttttgacattttcatcttaagggttttctagtaatttctacttcatggaaagagtgatatagttagttttctctaaatatacttctatccaatttatcatcacatttttataattttggggatgttacagctttcataaaatggtttaagttttaaagatgtttgaaaaggtttttggaaaaatacattttctgctggtttaatcgattacatacttcattcaatcgattattttgttcttagtcttagtccaacttggaaaagctttcaagaacattgtaattgattacctatcgggataatcgattatttgacctttgttttcatataaactaccttgtgattgaatataatcgattagcacttcattgtaatcgattacataattatatgtattttaaagtcgtgctgggataatcgattgccaatgtatcgtaatcgattacacaggcttattttgaaaaaaccatctcctttctttaatcgattaccatttctagtaatcgattacactacgcgtttgaaaattgtgagtttgtattagataatcgattaccacatttcgtaatcgattaaacagtgtatttggaaggctacaggctcctgctttaatcgattaccaaagttcgtaatcgattacatagtgcattttgatattttgaagtctcctgtcttaatcgattacaggacagaataatcgattatttggctcattgagaaaatcctgaaatggttatgaacggtttaattgattacattcttgatttaatcgattacatgtgcaaaataatcaattatttggcgcgtttaatcgattacagttagttacgaatttcagttataagtaagattgatgctcaacttgtttaaagaagaagaaaaacgatacccattcatatattctgagcttaaatgtcttgtgagcctttcaaagtgttttctaagggttaataatttcttgctctatttttacattgatcatgagagtttgagtcactcttgagcaagaaatctttcaagattaaggaaagctgattttgattttgttattcaacatgttctaatacttcatactgcattgcattctttggatcatcaggttgtttctctctttaatctaattgtaattttcgctttggatttcgattgtatattggctattgtaattgggttcttgcttgtaactagagaaggggttctctaggtgaaagaaccgagtagtgttctcaggttcttgtctcttagaatctaatagggttttagatttctgtactttatctagggttgataaagggagacattgtaattgaatgtaagaactggaaattataacagtggaactctaactagtgttggttggaagaaactggatgtagcttcatggttttgaagtgaaccagtataagtcacttgtgtgctgattctctacctctattctcattataatttgtgtttattgattctattaccttggatgtcaaactcttttttttgagttattgaatcccttgggctgagcatttgattgaataaggtttttgttttgtttttgaaaagtgataatgatcctaggcaactctaattttgattaaagaaattttttaaaataccaaggcttaaccaattcacccccctcttggttaagtgtgtagtgttccaatcattttcaggcagctggtagggatttcgctatgatagctagcgaaatacgtgtcctattttgctaggagctggagcgaaataggtggagttgtgacatgtggctggaccccagtaattcgctacccatctgagcgaaataggtgtcctattttgctacccagcctagggaattacaaccacacccccagctatataagcacacccccctccatttgtatccagtctgacactttttttcattcgaatactctctaaattttttgtgaatctcttcaaaatgagtggtaatggaaatggtttaatcaccattgtatattataatgggaggagatatgttggaccggatggtcaagtgtttgaaggagaaaacaaaatgtttcgtatgcctccaagatgcagctatcatgatttgatgaaaatcatatacaagaagttgtgattacaacgaggtcaatttgtatctcgattgagtgctaaatgtgcatccggcaacttggtgcagtgggttggtgtggatattgtagatgatgacgatgtagccttagttacagacgcatgcacattcgatgggggaaaccccagatttatagaattgtatgtagaagtatactgtggtggacagtcaagcaatcaacaatttgttgcaaacattggctccattgaccttaacatagagccgatggtgaattcggaagatagagatgtctccccatcaccacaaccaccaccaccaacccaaccaacccagcaatttgattctgaagatacaaaaatggcgctggcccacgacccagcttggcccagggacagttctgagggagaggttgatgaaggtgttgttccagatagtgactcatcggatacggacgtagacgatgatttcaatcgtgcttttgcaatcccttctccagggattgtcggaatgcaaaatctgcttccggtactaggtatggacgcataactatttgttagtcagtagtgttaacatgattgtgggtttaacataacaatgtgttcaatgtgtcattatacaggagagggcaatgtaccattttggtctaacataagccattacacgtatattaattgggcacacccagatgaggaggtagatgacatgcaaggagtgcaaatacctaactgagagatgggtcaagagctatataaggggcaggtgtttgggagcaagtccgatgtgcaaatggcaataaagcaatactgtatggccgagcattgcacagtcgtagttgcaaaaaagtgatatgaaaaggcttataatggtttgtgaaaatcataatgacggttgtccatggaggatgagggcataccaaaagaaggctgccactgaatgggttgtaggcatatggaacaaccaacacacgtgcgttactcataatctctctcaagatcacaagcagcttgactaaaatttcatatgttcgttgatcgtaggtaattaaaatatgttatatcggactctatattttgttccaatatttattaacatgttattgtctaatgatctgcagaaatgattagggaggaccccagtgttaaacttgggttaattcaggaaaggatttcaacatcgctcagatttcatatatcatacaggaaggcattgaaggcaaagcaaaaggctattgtgaaggtgttcagggattgggatgagttgtatgcgttcctgccaaggtggttgggttacatgattaattttgctcaaggctctgcctataagttggaaatgatagaccattttgttgatgggcaattggatggaagtgttagggtcttcaagagggtgttttggacatttaagcagtgttgcgatggtttaattactgcaagcccgttataagcatcgacgacacccatttgtatcggaaatatcagggaacattgcttattgcaacattagttgatggtaacaatcacgtccttccaattgcatttgcggttgtctctggggagaatattgacagctggttgtggtttttggcacttatccgtgttcatgttacgcagaaagatgaaatatgtcttatttcagatcgacatgcgggcataatggcgacaatcaacaatgtggaacttggatggcatccacccagggcataccatgttttttgcattcagcatttggcgagcaattttaatcacaagttcaagaatgtgatgttgaagaaacaattgaaaatgttaggtaagcaatactatacgacactgtgattacaagcagatgatccacaatactatatgtccttatatttacgtcttgtttgtatatgcaggttatacaacctcacgtttagattttgatgccggattagaaaaacttagagaagcaagccctcaggtagccgcatggattgatcaaatcccaaaggagaagtggagtgtagcttatgacgaagagggacgaaggtttggtcacatgacaaccaatctctctgagatttttaacaaggtacttaaaggtgtaagatgttgatttgagggggagctacttgaagattgaagcaatgtgaagacttggagatgttttgactttcaacatgcttgaaggcttgaagagaagattgtgattaaatgtaaaaggaaagaaagacttctgttgatccaagtctctgcatgcataccatttatattcatttaagcattacatctcaaaggctttaaataattgttttggaacttaaaaagaagctaagtgttttggaaaaatagcattaagatgctttaatcgattaatacattcaaagaatcgattacattgttcttcaagctttctggaaaattatcaagaacaatttaatcgattacatcatcggattaattgattatttcaaacttagtatacatatgatttggctgagtgactggtttaatcgattaccattgaactgtaatcgattacatgcctatttgaaaaagtggtcacgctgccttaatcgattaccacttatcgtaatcgattatttagtttgtttcatgttttgcacttaggctgccttaaaagattaccatgtgttgtaatcgattacattacacaaacataatttttgcaaagcttgtcttaatcgattaccaattattgtaatcgattactcagcacaaactgttttttcatacctcctggagtaatcgattacacgtcgggataatcgattaaatgacccgttgctgtaactcagaacctgctatgaacactttaatcgattacaggagcgtgtgtaatcgattacatatgctaaacaatcgattactggagcgcttttaatcgattatttcagttacagtttttagtataaatagaacccatgccttgtctgattaagagaacaaagtagaacttaaattttcgagcactgagcattctaaaagctttctaagcattcacaaaggctttcttctgggttctaaaagtcttgcttccattcaaacaaaaatgggtcattagaatttagtgaagcaaagacaactctttacaaagtttaaggaaaagctgttctgcatattgtttctgcattcaacctggtttttccattcatatgcatatcattcttggatcatcaggtgaattctttccttactctttgttgttgtaaagtttctgattgaatctttgtatgtgaatttctattgtaattgggtttttcttgcaaggttagagataatgtttctctaaagacagctgagtagtgttctcagtgtgggtgtgacttctaagggtctaatagggttttagacctctgaactttatctagggttgataaagagaagcttgtaattgcttgtaagaataatatttgcaatagtggaactctactctagtgttgagtagaagaaactggatgtagcttcatagtgtttgaggtgaaccagtataaatcttgtgtgttctttcattttctgcatatttgattgttctctttgtgaattctgtttttacatgttgtttcttgaggcattacaagtcttggattgatcttggataaagattcttgattgtttttgtgataaagatccaaagggcaaagaaactctgattttgatacatcaagtaatttttaaattaccaaggctaaccaattcaccccccctcttggttaaagtgtgaagtgttccatattttacataagaaaccttcctattacttcacttgtaaggttcacatacgcttgacttgtgacatactttttgcaacatggtggtgaggctcgtgaagagatggcgagaggtaatcatttcgccaaattagcatggcaaaaatatttgaagacagttcataaatccgcaacacattgtgttactgcttacgacacactgaacacaagatttgaggtccaagagtcgtacaacatacgtactcattggggcgaagagaaatagtcggtgtcattatcagaaagaaatcgtcagtgtggtgagttcactgcactcaggttcccttgtagtcatgttgttgcagcttgccggtccacacacgtcgatcccactcaatatatagaccctgtgtatagtgtcgcttatcaatgtcaattgtattcatcatagtggtttccaatcgggaacgaggacttcaaacaaccaactcgacaacccaccatcttgccaggtgtgtcgctaagacgtacaagaggaaggcctaagactacacgcatacgcaacgaaatggattcccgggaaggatcgacgactcgtacaagatgcggttattgtaaggtggttggtcacaatagacggaactgtccttcatgattgcaggatcagtgatgtttagttttgaattgtatgtcaaatgataatgtaatatgtttcaatttctaaattaattccgcaatacaacaaatgctgatatttaaaggaagtacgcaataattaagtaataaacaacaaatatccaaaataaacatccaaccatagtccactgaataataagtaatccaaaaataaaacaaaccattaacaaaacataaaataagtgatagtcactaatcgtcttcgtggtctccatgatatcccctacatcgactcatgttatgctcaaaaggtgacagattacatcgatatcatgctcccctcactggatttctcctaattaactggtcagggttgtcatcatgatgatcgtcactgccatcatctccgtcttgcattgccgctgctaagaagtccgtaataggactatcgtgacttccagaggtcgaggatgcaacaagatgtgtggaatgtgcaatcggagtcgcaattactgtatccggctttggtgtcacttgggcaggcctataaaactttccaaagcccaatgtcgcctgcgaactaggcccaactatcgcctgagcagtaggtgcagatgcatacatcagatacgatggaaatgaaaacctagacggtggcatcgacggtacagtataccatgggggtactgtgacggtggaaatgattcctgtccactgctagatgaactggcttgaaactgcggcggccaaaagtactgctgggatggccccgaagggtagccgggtgcatagaagatgccaggaggacggggaggaataggtggcacaatgataggtgtatcggcagggttgagtggtggaggggtaacccctcgtgacgtgcatgccggttagtatgaaccactggaggaagggcctcggtctggcgtcgaacaggtgggggtgctgtaacaccttgaaatttcaataactgcaaatgtatggtcaaaatgtctcttacacaactatttgatgtgagtgttaggttatgtgagatttaattggtttatatttaaattacttgggtgaaatattaattagagatattacaaaaatgtttgaagagaaatgaccatattacccttcctttgaagaagaaattacggaaatgctcttgaggtaaaaatgacgacaatgcccttggacttttggttagatattttaaagtagaagttacaaaaatacccttgagctagaattacacaaatacccttggatattttgaaaattacaatcataccccagaggtgaatgacaaattaccataatacccttgaggcaaaagttaccaagacaccctttgatattttgtgaaagcttgatgaaattatagagtacccttggatggcaaattaccaaaatactttgtgacaagaagcctcagaataggatttctatgaatttcatatggtaataactttgaaattttattcaggagaattccagcatcagaaaaatatggaaaaatgataaatagaatctgtggaattttctcttaattgtaggatgaatagacttattcaataagatggtttagtaattttgatggttagaaacagaatggaccaatcagaattaagataagagcagtcttgtatgtaaggtctgtgtagcactctgtatagactgcttgtgagcaatttatactataattgaagtcagtttctagaaaactctagagttctattattcaatattatccttaggtagaagagtttgaatcaaactttacttcttactagaaaatgccatgtgtaaagtaaagatgaaactagattctttttcatttaaaagatgacatatgtatacaaaagaaaccatataattttctctttttaaaaggaaataaaacatgatatagaaagaggaaaggaagataaaaatcttccccttggctaaagagaatacacgtgaagaagagaagataaagggctaagaagtcatcatgctttacaaaatatttacacaagataacatgaaaggaagaaaatcttctcttccttccttgtaggccaaaatggagaaagaaggagaagcttcatgacttagacaagtggagggacacttgtaaagaaggcatcatgacttaggagatttttgcataaagtaaaagatatttaaaagattaattatgagtttagttaggatggaatggaataagaagaaactaagttatgatggaactagatgagagtaactagctagaaagggtagaaatgtccttgaatattttattattttccaaactctatataaagggaggaaggccttaagtggaagttacattcaagactctattcttccacctattccacgtgaaacctctccttcatttcgctttcatcctttcattttcaaagcataaagagaccccacttccttgaagaatcacatgtagaagctagtaccattaggaagagatagacaagcttcataagaggttataaggtatgtatagggaagctttatgataaagatagtttaagtgttgtttatgataaagatagtttaagtgttgcttgtgtttgaataaatgcttaaagttctatgtagtatgacttgtatctgagaaattgttggactcaagttatagttatatgattgagtgcttgaatgaagtttcaagtgttgttgagtgtttctatacatgggtgatatgttgtgtacttgaataacaagctgtgttctgtacttgatttatgttgaatttttgaataaaatatatgagacagtggttgaaaactgatgttgaaaataaaatgaatgagttatgcataagtctcacgtgtctcataagaattgccttagagtggaggtgtatataagagttgcctcagagtggaggtgtgcctcagagtggaggtgtgtcagatagttacaagagctgagtttgtgcattcagacaagagaagtctgagctggggggtgactcttgcgttgaggaatcacgccacccatgatgatcacatgaagtgtgggtgagaacctttgaacatcgggagatcctgactggtcggatcagttctggaccactgggatggggctatcttgacagttggtaccaaataataaaagttcaagaaaatcatgcatcatgataagagtctaagagaatcatacattatatagaaattttgaggatgttgttataaatatctgcatattgaatataacctgttgcttaaattatgtttatcataaacttaccctgtattttgtgtctgtggttgacacctgcgatgacctcaattttatttgtgcgagcagatgaacagtaaagaaggattggcaagctgaaaaaggactttgctgaagatgtttagttggagatgttctgttatgataaaatgttttagttatttgtactatgtaatagaattgatatcagtttgtatcttattttacagtatatctgagttataaatgttaaccagaaatggaaatctttttgaatatcagttaatagtaactttggttcaatattttaagcaatttgacaaagaattttcattaaaaatcaataataacaagattgttacaggtgtaacatctccaggatctgtgactctatccaaatcttcacatgcggccaaaaggcaaaccgcctcatcgtacacctgactcatgtcaaatgccccctacgcctctggtgccgtcatgtggacaatagtctctgtgcgatcagtctatgcatgaaaaaaattaagtcaacaccgacattaagttaagttaaaaactcacaaatataaataatttgcccaccacatgtgcattgaacgcagctctttgggtcatccagcgacgtgtgacagtgtagtaccactgcatgtactcaccgttgatagataaatacccatctctccgcataggtgtaagatcgtgcaagacaagggcatctctgtctgcccattgggcaatgtagaaaccatgtcgctgcctccaatccacgtctgtcttgccggtaatactgatggtcaacagctcactatctcattcctatcgagaagactaagtcagggcgagctcttacttagagagagttagttgggtagggtcaatagctcgaagatcaagaaatcctgagtaaggagagagattctccacaagaacgacctgtcaggttagaagtcactttccaagttggctcccaacgtaccccctgaaacaagggagttgagagaatcggatcctcgggtataggctggtcaaacccaaactgccgcaaaactcgatctggctgctggtacacgacaatctcgtaacaaatcagaggacagacaaccaaccatcgtctagccatgtcaacatccggtggatgaactagatcagcaagatcgtatggcctccaaagaatatctctcctacgcatgacatccatataatgacgatatctgtgaatatgggtaaatctggtttggcgcgtctggtaaacattaaacctgcaacaacaaaatattagaaacaacaacatttactcccaataatggcaaacccacaattgcaatacttgtttccataaatctcgcgctcaagcacatcctgatcgtttacccgcaaaaggtttggagagatacttgggaatcacgtccaagcccacaattgcaacaacagtgcacatccacccatctcgcgacgtgatgcacggtatagtctgatgatcatatgtcgtggcatgcctgacattaattacacgatcctgcgtgatcggatcaccctgcgaattccacacattcgtcgatagatgtctatcctgtaacgtcaacaaagtttgtacagatggaccggggtcaatgaggcaacggagacttagtcactgacagtgctgggacatcttgatccattattctatatggatgatttttcctacaaaaattatccactatttttaataaagtatttcactatgactaccctatgttcattaaaaatatgtattactatgtctattactatttaaattatattgtcaaataatttgtaaattaatcaatttatttaaataagtatgtttaattattatataaatatatgttaatattttaatgtcaatttgaaacattaaatcaatattaaagagtatataaataaatattataatattagataaaagatacgtgatagaaaataataaattgtaataatactttatgtttaatttaatttttaaaataaatatgtttaattattatatgcatatatgtatcataatttgtattacatatttcaaataatcaaattaaaaatataatgtatatataactataaattaaaaacaattattcaaaatttaatgtatatatcactaaatttaattatatataaaaaatatttttttaaaatcatcatgtccacaataaatggaataatataattacataaaattatatatatatatatatatatattcggttaatattagaaataaataatataatctttcaaaaatatttaaataaatttatttctttcaagttatatgtattaacaataatatatcattaattttaatattattactatatattatattttttaaataaaatcctatacatatatttttatgtacaatttcttaaatgtatataatactaaaatatgtctagcacttataacaaccaaacaatcatcaactaaaataatcatgtaccctataaattaacaatcataattttaaactacatatcctctaatctaatgtttcaaatctaaaatctatatattatttaacaactacaattataaaaataatatattcaaaaaaacaaataaataataaataaacaaaacttacctgttatgatacacactaagagaggagagtcacactgagagaagagtcactttcagataattttagaatgagagtgaaggaatgaaagagtgatggatgaaggaggggggaggggtttaaattatgggccacgtagacgtaattcactgggttcggtagagaattacgccaacgtctgccacgtgtccataacgacccctttttttggtgaccgttgcacgtatttcgctgggggccaagcaaaatacgtggtacgccatgtggactgcccgttgttgaccacgtatttctttggtgcctgtagcgaaatacgtgaccaccagatttacgccacattagctcccctattttcgctgccttgggtagcaaattacacaatgtggcactctggtaatacgtactgtgcacgtggcatttagggaattaatattaaaattcgtggcactgtggtcgaggtctcaaattctcgttccccataaattgcaatgattagatagggaatttatctttaattgcattaaaacatgtccattatttcctttagaatggtaaccacattttcttaaccattcccaatcagaaaatgtttctttgcacatcaccctataaaaagagtttctttttctttcatgtcacttcatttcttctctcacgcttcccacactctagaagcttcctctttcttagaaatctctgatctttccttctcttcctagaattcatttcaagtttacgctgatattccatggctacctcttccatctgaactctagatagtgcgcttcctattgctgtttctgctagtaaactcataaagttcaatgggaaacattttgccccctctcctggtttggaggctaagaccaagaagttatggaaactaaggtaatgatcccttattctcttgctgaaaaatccctagcttttgcaggtccaattcataccaacccgccactagagtctttctcttttttcccaagtactgtagaagaaatccctgctatccatgatgatatcatcagaacggacttcatgaaggatggtaaaaagatttttcgttcaaacccctcttttggtcgaacccatgatgtaggatggttggaaaggctcgagactgattatgctaaatggctggaagaaaatatgaattaatgacctactttaactctacaaactcgatgtttctaaccttgatatttggatgatcatggtggttgctctcttttggaatcaaaatacttgtgccctcgaactaccatgtggacctatttcaccaacccttttcgatactgcagctatcactagtttaatgcccattggtgaaaactatttgataggctctttcaaaaacaccatcgaacccaaaatcctcaattggaaaaaaaagtcttatggaggtttcatggagaaccatagaggcttccaatatgataaaaccaaagatcctactactaatcaagtacatttggccttcatgttatattaggtctgcactcactttatgtgcaccaagtcaatccaggttcctactgttggatataaggggagcaacaagaagatgaagcttgtgatttagaagaaagttttgagcttttcacatgccttgaagattgtaattcaaattaagtgtatgagaggccaatcttttgatccttgcattgcatgcacataatcattaacatgcttaaatgttttcattaaagtatcaaagctattcaaattttaaaaggaatcaaatgggtaatgtttttggaaaaatataatcttactgctttaatcgattacacatcggtttaattgattatttgcttcgttttaaatctagaaaagccttgaagaacatattaatcgattacataacttttataatcgattacatagtaaaaacaaaaagcatgtctcatgctttaatcgattaccattaattgtaatcgattacacaagcttatttcataatgaacctttctgctttaatcgattaccataagttgtaatcgattgcacaagcttgcttcataaatgaacttcactgctttaatcgattacagcttgatttaatcgattatttgttcattgtaaaacccagaatgaagctttgaacgctttaatcgattaagtgacaatttaatcgattacataagccattttaattgattatttggcgcgttgtaatcgattacagtctgttacaaaaagctgttataaataggataaaggcttggctgacaaactaacttgaatgcttcgaattttctgaatatacacaaaccttctcaaagttagaaagtgattttctgggttaactaagttcttgtcccacactttaatcttcatgggtattgaatgatttcttgggcaagagtttccaaagaagttttggagagcatgttctgaaatccttttctgcatttcaactctgattggtaaaccacatgcattcatattcattggatcatcaggttgtttctctccattatctctagttgtgaattcgtttttgtattttttgttatttgaagctattgtaaagagttctttgaaccttgtgctagagtagggttctctagggaagaacagagtaatgttctctggttcttgatcaccaggagtctaatagggttttagatttttattctttatctagggttgataaagagtggttgttgtacaacttgtaagaactgaaagttataatagtggaattctaatatagtgctgattagaagaaactggatgtagcttcttttgaaaagtgaaccagtatattattgtgttgtttttctattccttaatctctattagttatcttgttcatttgttcttggtattattatcattactcaacaggtcctattttgagcaattgatttcttgagctgagtggtttgattgattggaagcattcttggtttaaaagtgattaagatcttttaactctaattttataaataaattttaaaataccaagtttaaaccaattcacccccctcttggttattgtgggtattcctattgttttcacctactagtttttataatcttgcacaacttctccatattggaattgaaaacctcagatttgtcttgctaaacttttgttgcccaatgtgtatcaagcctttaatgacgctgtcaatgttatgaggagagaagaacccatcatgggacgcttttggtttattcaactatgattaaatgcaatcttgaagaaacacctcaggctcaataaaaggttctctccttccctcacactaaaaggtgaaagattaatttactatacccttacaaagaaaccttcagaggagtctttcagaaaattcatcgaaatactcttgaacacaaatgaatttattgaagacttatctctttttgcccagtccacaataaagggtcccatttgtttaaagaaaagttttcttgcagatacacttggcaaacaagctgagttgattgagatgtggtcaggtgtcttgacttgggatattttagtagctggcttgaacataaaaaatgtagctttctttccttaccaacctcagttgttttctcgcaaatttggcttgagtcaattaaaaccatataggatcatgaagaggctcccaaacttgaagagtttctagtatctgaagaaacattgtctcatgagttaaagaagcttatccccaagagaaaactgcaattccatcccattttcttcaaaaggagcttccattacactaaagaattctatggttggtggaatacattatgttcaaagagaattatttctattgaggatttctacaagaaattgacttcatttccatttcttgcaagaaactataaagaaaaagaaaggtaaactcaaacactacaagaaaatatctcaattcgagaatttttaaaggagttttatgacccgaatgacatacgttttactattaagctagcagccatgtctctaaaggaaaaattcagacaaaataggctcaattgaaaagtaataaaccctgaagcctcaaatgattttgacaaattttgtccgaacaatcttcccatttttccaacagccaaatttgccttttaaaatgcttaagacaaccaaaatgagtacgagaaaactgatcttttctgttttgcttaagcttaatcctcctaggcagaataagattacctctacaaagctagtttatgccctctacctttacctcgtgatgatcaattaccccattggcttgttagtatacataaagttaaactgctcactgaaactacttagggtaagattcatcaaatgtctctatgtgaattttataatcctttgccttttgattatcataatattttattgacctcgttttgattttagctcttcctaagaagatttctaaagatgctgaaatttcaagtgatgataaagaacccctagcaaagtaaaggtgcaaggaagaaaacctcaaagaaatccaaaagcattcttgtcattaaggtaaccaaaggacatgtttcacttcttttcaacatcatcaaaataaacatctttctatgttgttttcttacttttattttggttctagactgccaaagcgaccccatctactaccaaaaccaaaaggattataactgaagtggcaaagcctttgttacataagaaatatgcttctactactattggttctgtaaggaccctcactgtggcgcggttggcaccagatcccgcgcggatagcgccgggatcattcatcagaaaaccctgttaagggtgtggcgcggttagcgccaggctcactgaaggtggcgctgatagccccaggttggcgctggtagcgccagggtctctggaagtccacgccatgagcgccagagttggcgctgggggcgccaactgggttggtgtggcgcggatcgcgccacaggttctgcctgtccacgccgtgggtgtggaagtgacgctgatggcgccacagtttctgcatccggtgcgggtagcgcggaacctggcgcggatcgcgcgggaaggtcggtgcagactttttaaagggaaggtcgcgtttttggaggagaagaaaatggttttcttcttcctccaagcctccagcagccatgggagagcttcccaagctcccatgaccttgccttttgatcctaaacgcttccttaacccttttctcccctgagaaaccaagtgagagcgagaatccttcctccatattccttgaaaccccagagaaactcctcctctgagaaaggctgaagagaactcgagcttgggcgaggtatggcggcgtctcagctgcaccagggctagggagagcagcccaaaggctttcctcatcagttctgaggtaagaaactcgagtttctccgattgatttgtgatttgggggttttgatgaatagtgacccatctgtgatagagcttgaattagctctgggtccagttgagagatgtctttagaatgatgagaggaggaaggattagctttcagtttgtgttttggtgactgttggttttggctctaggctgtgcatgtgtgacttggactgagtcacttgacttgagacatgcaagagccaaaatgacgggcttgaggtgcctgagtggccatggagacggtgtcatgtgatgtagaccgtccaagccctgagaaaccctgagtatttgggtgataagagctgagatgctcattgtgaatggctggggttgagtctgtgaagactctgaggccatggttgatctgagatagaccactgagggtctatggaaaggcttgtagaggataagcctgatgaaccttaggcagatgacctggggtgatgggaagaactgtggtttctttcccaggggcagtagtggactgcctgatgagcttgttcatgcttttctgctggaatggtctgtgatatgtgttgtatgccttggtagggcttgacaccgtgggtgtcagaggagcagaccatcagacgaggctagagctgtggggcacggtttgtcaggtaagctcatcgttctggggtttttcccttattttggtttgccacccaagtggggtgaagtttgcatgctatgtttgaaatatatatatatatatatgtgtgtgtgtgtgtgtgtgtgtgtgtgtgtgtgtgtgtgcgttggaagcctgaagggctatgagaacggttcttcgagtggaactcagaccgttctggaaatatgaatatacgatgaaccctaggatagacactaagacagtgtgaggtgttcagtgactctgatgagatgcagaccatgagatggtctgtgatggaatctataggatactggcatagtatcgggctagttgaggttccctagccagcggaagagtttgaggactccctgaaatagctgagattccttgggaggtgccattgctctccactaaagtcctaagggtggattgccctatatggatgttcctccttaggcagagatgttgagaatcctgagtgattatctcaggtatgtgattaaagtcctggagggttttcccaggccagtgtatgtgaaagtcctggagggttttcccaggccagtgcatgtgaaagtcttggagggttttcccaggccagatgatagacagatatgttgtatctctaagagagggcttcccgaggggatgagagcctagggcctcttagatgagccatatctggatgagttaagtcctgagtgagagtcctcaggcattgttgacatggtttcaggaggcggtgcctctctggtgctgagaagtgtccagtgggtgacacttatgataaggtacctctgtgagatgagtttcagatggctgtgagagccaggatgaggtggaatacctctgatgctgagagcatccggttatggacccaaatggctgggacatatgatagccaggatgatatcctaggctttgttatgcttgttttatatgtttgtgcttgggagttaaaccagggttagggaggatctcccagaaccttgagcttactgagacgtttgtctcaccctgtgtggggtttgtggttttcaggtgcttcttctggagcagagaagcgacctcagggtagaaggccctggtggatcttgcaggctggatggagggctgcagtagaagaccagattagagcttccggagttgaagctggtccttgtatctctgtgtagtcgtagggtgtgtctacacccaactgtactgtacatatttatgatgtatgaccagatgtggtcttgttttgagcatgtatatgtacagatgataatgttgttatatttgagtttatgtttcctcctgatatctcttgttagatttctatgtttgtatctgcctatgtttgtatgttctgttaactggatcattaggggcttatgtatgatttacatggtgtgttttttttatattccatacataatgtaatcaagaaaaacgattttatcgcttccgcaccgcgtttagttaacgcagatagcgcgcttatgatattattaatgataacacgtccggggtgttacaggttcgaggcaaagtactttcgtctcttatcccccaaccaaaaatgcttatccataaaaggatacaacttcatctgaacgaacaacaagtttctaaatttgtataattttgattattctatttataacttactatttttctactataatgttcaagtttttggcatcccatcaaaatctacacaagctcataaacgaaaagctcaatcaatggaaactggtgtagaaaaagcttttgaagatactaccaacatctcaaaagaagcaattgaaacaagtacattcctttgctacccattaatcattcatttaatgtgcttaatggtttcttaagtggagatttttgatgtgccagtatattcccacctgatagtactttactagttccaaatttcctaagaaaccatcgaatacacaatcatcaaacatacttccactactaaaaaatagagacttaacgtcggccagttaacatcggttttaataaaaatcgatgttaacaaaaacacggtgacatttttgtaaataatgtgtttttttaacatcatttattgttataaccgatgttgtaatttttcctcaacattagttattttaaaatcgatgttgttagtgttaagttaagatcgagttttaaaaaagttaacatcgagttttaataaaatcgatgttatttttttcgcttaacatcagttttattgaaaaccgatgttatcaatgtgtttctaatttaagaatttcattccatctctctctcattatgaacaaaaagtggggctgctttgctcaaaccctcttctttctctctgtgtccccgactcttcatctactcccctccaccacatgctcaactctgcctccattgtcgccccctccccgctgccgtcaaaccacgatgttgtcatgcacctcatgattccctcagctgtactcccttgccttctctaatttgagttccatctccaacctatctgtacattggcggtaggactcaagatcacctctaagttcatcagggagacaaatccactcactttctctaattgcagttgtatggacttgactccaaagaagaccttagtttgtctgtagactttttaactggtgcatcactacataattgcagcttgccccttagattctgaatttccttaagaagtgactccttctcatttgaattaaaagagatgtctcgttgggctaactcttcctggatttctttaatttcacatttttcctgtataatacatggtaaataaccacttgaggaaattccccttagaagctgtgtattattgattattattgagtcctatctatcatttttcagttacaggatacaaactaacttgttatttaccaatagttaagtcttgatgaacttgggcatcaaggaagaatatatggtgccattcatgatcaagtctgttgcatttatctatttccagggaagaaaaactagtgcagctcgccaaactacttagagtaaatgcaggaacaaatcctagtgcagacattgatccagttattagcaaaaaggtgcaaacatttatctcatttttcccatggtgttaaattcatttaatgccacttattgctgattgttagagactaaaaaacaaggaaggaaatgaaaatgcagaacagggaatgacttgtattatttgcagacgaaaaggaaaatacagaaggaatgaatccaactgttctgcagatttagatgacactttgtatcctctcaaatctggtctggcaaaatcaagtctccaaaatattaaacataagccactatgccatatgcctatgtcacagcattctcagaaatgactttgtaatttgtactaacatgagtggtatcattgatcatagactacatggttgagaagcttggcatagaccctagcaaaattgatgatatgtccaacctcctttacaagaattatggaacaactatggctggtctaagggtatgtttcctaatcatttcctgtgaaattggttcccattattaaattcttaaaacactaatagcctataattgttatttgtttcattttctattcaggcaattggatatgactttgaccatgatgaatatcatgggtactttgcttttttcttttaccccatcacattcaaactgttaaaacgtgttttttgtttttaattactgtgtttattatgaaatggtgacattggttttttaattactggttgcagctttgttcatgggagattaccttatgagaacctaaaaccagacctagttctgaggaacctgttgctgagcccctacaggaaacttgtaagttattttatgaccaatatgaagcagtagagttggtcacataagatggtgcatagtatctaatgtgacctctattgcttctcttgtttttgtcaatagatcttcacaaatgcagataaagtccatgcggctaaggcgcttaacaggcttggattagaagactgctttaaggaatcatatgctttgagacccttaatcctatccacaagagcactgtttctgatgatgaagatgacattaagtttgtgggttcaaagaccaccaatccaaccatttgtaatggttcaggcacctctcaaatctttgacatcatagggcattttgctcagcccaatcccggtgcagtcttgccaaagacaccaattgtttgcaagccatcagaaaatgccattgaattggccatcaagatagccaaccttaacccacaaagaactgtaagaaattcatccttttggctttatgatttaaggctaaaatacacttttattcggtcatctaattttttggttgcaagattaatatcttaaatttttaaaaagttttactttgttcttttaaattgactctattatataaaattggtcatttccttactttatcatgtaagtgaagtagcaccttaactttgttttttcttcagctcaatggaattttaattatcgtggctacaggttatgggagcgacttggtatctatcatcaataaggaggcaatttaactgttggaaaacgcagtgccaactggagaacaaatcacataccctgcgacttggtatctatcaccaatgatgttttcacttctagtttcaaggaaagatacttctattgtctttggtgaggtttgcaaataaggtaggccttcttaatctgcctacttttcttcctttactaccattttgtgacaaatgttgaatttcatgtcttggatcatacaataaagttttccgagcaagttaacatttgcaatcactatcacaaatgcatgttcatatataaaacactacgagatactgtaattattaaaagtctcccacctccactgccaaggacccttaaaagtaaattatgtggatggttttagtttgctttttttgggaccaactttagaaacttgtaatgcaaattatggtgtttcgcgtctttctcttcttcttctcctttcttgtattattctacttagacttctaaatacatccgagtctaatcctcatgctgatatttcctacagtacttattgtctgctttggaagtgacatcttgtactgttgctttcttacctttcctcttccaaatgacagaaactagatatttagtttaattttgatggccctacaacagagttgcttttttcaaaatttaagatatgggaaggaacattagattcatttatacttttatagtaaatatcacctgcatcatgtatttatcaatgtggataattgaagtcatggtggatttgaatgatgtcagtcaacaatttgttacttaggtggcactatactcagtgatggatacaaaggtgagagaaaatatggatattttatgtcaaaaaaaaaaaaagaannnnnnnnnnnnnnnnnnnnnnnnnnnnnnnnnnnnnnnnnnnnnnnnnnnnnnnnnnnnnnnnnnnnnnnnnnnnnnnnnnnnnnnnnnnnnnnnnnnnnnnnnnnnnnnnnnnnnnnnnnnnnnnnnnnnnnnnnnnnnnnnnnnnnnnnnnnnnnnnnnnnnnnnnnnnnnnnnnnnnnnnnnnnnnnnnnnnnnnnnnnnnnnnnnnnnnnnnnnnnnnnnnnnnnnnnnnnnnnnnnnnnnnnnnnnnnnnnnnnnnnnnnnnnnnnnnnnnnnnnnnnnnnnnnnnnnnnnnnnnnnnnnnnnnnnnnnnnnnnnnnnnnnnnnnnnnnnnnnnnnnnnnnnnnnnnnnnnnnnnnnnnnnnnnnnnnnnnnnnnnnnnnnnnnnnnnnnnnnnnnnnnnnnnnnnnnnnnnnnnnnnnnnnnnnnnnnnnnnnnnnnnnnnnnnnnnnnnnnnnnnnnnnnnnnnnnnnnnnnnnnnnnnnnnnnnnnnnnnnnnnnnnnnnnnnnnnnnnnnnnnnnnnnnnnnnnnnnnnnnnnnnnnnnnnnnnnnnnnnnnnnnnnnnnnnnnnnnnnnnnnnnnnnnnnnnnnnnnnnnnnnnnnnnnnnnnnnnnnnnnnnnnnnnnnnnnnnnnnnnnnnnnnnnnnnnnnnnnnnnnnnnnnnnnnnnnnnnnnnnnnnnnnnnnnnnnnnnnnnnnnnnnnnnnnnnnnnnnnnnnnnnnnnnnnnnnnnnnnnnnnnnnnnnnnnnnnnnnnnnnnnnnnnnnnnnnnnnnnnnnnnnnnnnnnnnnnnnnnnnnnnnnnnnnnnnnnnnnnnnnnnnnnnnnnnnnnnnnnnnnnnnnnnnnnnnnnnnnnnnnnnnnnnnnnnnnnnnnnnnnnnnnnnnnnnnnnnnnnnnnnnnnnnnnnnnnnnnnnnnnnnnnnnnnnnnnnnnnnnnnnnnnnnnnnnnnnnnnnnnnnnnnnnnnnnnnnnnnnnnnnnnnnnnnnnnnnnnnnnnnnnnnnnnnnnnnnnnnnnnnnnnnnnnnnnnnnnnnnnnnnnnnnnnnnnnnnnnnnnnnnnnnnnnnnnnnnnnnnnnnnnnnnnnnnnnnnnnnnnnnnnnnnnnnnnnnnnnnnnntttgaaaatataaaaaaaaaaactaaaaaatggatgttgagaagaaaaaacggggcatgaataagatgggccctaaagtaattttataggaaaactttcattattaatcaatcaaataacactttaaatgtgattttaaaaattaaaattaaaaatatattaatttctaataaaatgataattagtgattggttagtagtatatagaaatctttattatgttaaaataattcaatttgccaaaacaatagaaagaataattcagcgttaaaatctctatttcattactaattaatctatacactcaactgtagagccattaggggttagttcattcaaaactatgtaccaaggttgtcaaaatcgcgattctacgtagattcatggaggcctaacagaatcgaatcgtagaatcataagagtctactttagacagaaaaaaatagtaaattgcaaccaaaaaatacatgaagaaattatcaccaacagttaagtataccacaatgttctgaatgtaatatagaaatagatatacaattaataaactttaagaaatgattggggtatgacactttttaaatgatctaacattcattgttaacaagcttttcatacttgtttacttgtgcatttggccaatattagcacataactatcaaagtttgctatgtctacaattattagttacttagctccttgacattgttgatattgcaaagaacttagaacaatctgactcgaagagaatatctagctatattctaattataacattttaatatctagcattcttctcacccaaaccaagaataagtaacatcatgaaaggaaggtaagaaaaaccaagtgacctctagtaaatcatcacttaatttgataaaaacaacttggtaaaatattaaacaagtgactcacctactattctaccaaaaaatgaaattgggattcttttcacaggcaaaaattcaacaattaaagatagtaatgcatgttccttaccctggggctaaagcaccaaaccactgaagcaaaaatccaagaatggctttcaatttagaaattactgtcattccaaactaaaaccatgattttcctataatatttgttgtaccagcaactatggatgccatagaaagacaaatatgtatcacaaaaggtttgaatcataaagcactagacctatcaagtcctttcataaagcacaagacctgattcattttctttaattaagtgtagatattaagtagtggtaagtatagacaaagttcactaaattttagaaataaaaccaaaataaaacagttgggcccgatactcatgttttctatgattcaaacattacatcaagcatgttattggtagctatagagccaaccaatttatcaatggtacctgcaaggaaaggaaaataatggcaaaaaacagagagagaaaagacaaataagggttgaagaagaagaagaagggttcgagtataacctcaatgagcaaagtacagtcagtacattaccaagtcacgaacaacggaacgagcaagggccgaggagtgatgctgacaacggaacaaggagcaacgccggagcaacaagcgacgcagactagtatcaccagcaacactgcgacggagggaggaagaagaacgaagcacgaaaatgaagaaatgcacagcactaacagaaaaagccaattcgaacccttacctgctgtttcaaaaatgacgccgttcttcttcctcgcagactcgcaaacactgcgctaactcgcgattccactcaaaatcgcctaattctatgtagaatagcgagtctactcctaaaacgagtctgcaaccgagttgaatagtggatggtaggtggaatcgtaaaatcgatcgagtttgcgagttaaatcgcgagtttgacaaccatgctacatactactaaatctgcacgagaaatttaggataaatagaagttgacttcatctatatttctagatcctcaaaattatttcatgcaaggttgttgcaatgaagcttgtacgttcataaggaaggtaaaatatcccatcataccaattaaaaactataattgatatgacttttaatggtacttattataaaagtaagcttattatatactatgatttgtgataaagacttatactatcggtacatgtattatttattaatataattagagggacaaatttgctgcaaaactttactagacataaaagttcttcatttaaaaatccattcatttgccaaattgcttctatgttctaaacttgcctgaattttgttacttagtgcaaggttgtgaacatattcacaacgtacgatgacatcctgttggactagaggtagcagaaaacagaatgctgctagcgaatcaccaagaagtaacctttcaatccttcatgttctttgttagcatgtgattactagtatccataaaacttttcttgttattaacaatatccatcatttcactttgtttaatttagttatttagttaaatgtttaatttacattaaattttttgtttaagcttttaatgtatcttttaaaattacaagaaggaaaataaataaaaaaattggacatttttttttaaaatgatattctacatcgattatataataaacgatatagaaagtgaatatacaacatcgatgtggaaaaaataatttttacattggtttttggttaaacgccgaacaacatcgatgttgtaagatgcaaaacaacatcgatttcggtgacaatttgcccaagctttttatttttttatccattggcaaaatcactttccacaccaaattgaatgttttctactttaccctttcattgtaaaaatgagccactttctctttctgacatatcatgttttctaaggcaatcaagcactctttgtgtaaattgatcaaatcatcaaacatcatgctccaatagtcatgtgttggtaactcattttgtctttgtattcgaatagattgaagattaatctccactggaaacattgcctcatgcccacttatcttttgatttcagtagttttattatgaacttcccttaattctagttgttttatattttgtacatttataaatgttgtttaaattttgaaagattcatccatgcaattctaatgttttaataggtatttgttggatcaagaaactaagccaagatgaagggcaaaagggtcaattttataaagtttcagattgaaatttgcccaggctagcattcagctcgcctgtgctaatgagattacttcttcttgaagcaaccaactctcgcttgggtgagctacagctcgcttgggcgagctaccttactttagccagaagtaaccaactcgcctgggcgagtccagctcgcctaacacctcttgcaccatttgctttaaaagccatgcaaatggaggaaatggagctcacaacaaaccaaaagcagaggaacaaaaaagagaacgtaggaagagagagaagacagaaaaggagaagaaatcctgcagaaaaagaccgtggattgcttccttcgtcatgtcttctattgatcttgtgctttacataatgatcgactagtttctccaaaggattcgatgtaatcttcatacccttatgtaccgattttgatatttgatatgtatatgaatcttttgtactcattactggtgatttcattctgttcgtaatgcttgatactacttgatcactagtttcatgaaattggattctaagtttaactagaaagtgctcttagaatttgaattgaatgatttcactctttacggtacatttttaggaatagggcataacgttttgattgcaaataacacgagattatgattgtaatgctgggttatttacttcatatgcaagggatcgatattcatccataggattcttgaatgcgagggatcgattcaggatgaattaatgtgtgcatcaataatattagaaaatgattcatatgtgttaatgttaattgagtactgatggtatgaatgatgaaatccaatcctacctttctcttggattaattaaattcgtttaaattgttttcgtaatttttggtattcctgacacactaaatccgttatttttgtatttttgttaattccataattctattattttcataacccataatatttctatcaactttattgtacataattattcaactgttacttttatctagaaaaactgagtagctcaagttcctatgaagactatctctttataaattttgtaacctgtgacgagattggtatgcttgccaatagtctaacaagtttctggtgccgttgctagggacttgagtcacttactcaattctttcagatttaattttcagttaataggacattttccttactttctttctttatttgattttgattttgtataaattctctcttgttatattttattatcgctaaccttggtacttacaagttattctagtttattttttttcctttatgcgaggtaaatttcctatagataaatcactatttgattcgaaaattaccaagattgaaaggaagaaaaggaagaaaaagaaacaagcagccaataagctaccaagtgaaactttttctactggttctccttcactagaaaagccatttgtaattgatattatggctgatagaaaaggagaaggaaatagaccaccaaggagaactcttggtgattatgcgtatcaacatggacaaaagcattacaacaacatagtcattcctccttttagtaacaaggttgttgaattgaagccaacattgctcagtcttattggctcacatccttttgttggaatggatcatgaagatccatacatacatttgtctaccttcatggagctatgcagtaccatgggagcttttgatgaagatgctgaagctatctatctcagagcttttctgttctccttgatgggtaaggcaaagacatggctctaatcacatccaaacaaaagtctcaacagttaggaagaagtggaggaaaaattcaatgcgagattctttcctccatccagattcattagtgcaaaatcagctattgctacttttttccaaggattagatgaacctctctgtgagacattggagagattcaaatctttattgcggaggtgcccaaacaataattttgatgatgttgcacaactacatattttttacagtggtttgagacctcaaacaaagatgattcttgatgcctcaacttgaggtactatgatgtctaagagcccagaggaagcaattacaatcattgactacaatcattgactccatagcaaccaatgattattagagtcaccatgataggtctctagtgcaaagaaaatgtataatggagctggatactcaaaatgcaattctagctcagaataaattgactaagaaaatagaggccttaaccaaacaaataggccaacttcctcaataatttcaacaaggtggatcacagaaaatgaaccaagcttatcaagttcaacaagttctaagatgtgatttctgtggtcaagaccatcataatggccactatccagcacctggtgattgctaacaagaagaaaagactcattatttgcataattaaaccaaacctcaatagaacttccaaggaaattaccaaggctacacaggtggtccaggttcaaatcaaccttatggttggagacaacaaaataataatgcctatactagtcccactaactcttcttttgcaggtcccactaacaactcttatgcaggtccttctaataattcttatgtaggtccttcaaataggggttcacaacaacaacaagctcagcctgatagagtgtaaaaaatggaagatactctaactcagtttatgcagatgtccatcaccaatcagaagaacactgatgcttctataatgaccctaagtcatgacgcgaacggcgcaagcatcggagcgtgtttggcgctctaaatagtcctggttgctgaaaaatggacaattttggtgttttgctgtgagccacgcctcaggcgtgggagccacgcctgaagcgtgggaagtgctccagaaatttcactggagtgccacgcctggagcgtgggagccacgcctggagcgtgggaagtgctccagaaagtggattttcactggagtgccacgcttgcagcgtgggatgccacgcctggagcgtgggctgcacgacagggcctatataaggcccagaagctcgaaatcttgggccattttcttcctcttcttcttcctcacgacctagacctccattagaggtgcttctaagctttttggggccatatttgagagcttaaacaccttctgatggtcttgaagcgtgagagaaacctatgagagcttgaatccttcatcctttttccttaaaaacccctttgtgagcaaaaatccctttcctcagagaaacctcagagaacttgagattggcgaagacccacggcgtataaaggacgcagaagctcgaggaagctgtcctgaggccttttggagtcgccactgaggtaagaaactcaagtttctccgattgattttggatttgggggttttggtgaatagtgacccatatgtgatagggctagaattagctctgggtccagttgagagatgtgtttagaatgatgagaggaggaaggattagctttcaatttgtgatttggagaactttggttttggctctaggttgggcatgtgtgacttgaactgagtcacttgatgtgagacatgcaagagccatgttgaggggggcttgatgtgcctgagaggccttgagaacggtatcttgtggttcagaccgttcaagccctgagaaaccctgaggttttgtattgagagagctgaaatgctctaggtgaatggcttggtttgagtctggaatgactctgaggccatggatgaacctgagatagaccactgagggtctatggaaggcttgtgtggataagtctgatgaaccctggagtagatgactcgggttgagggaaagaactgtggttccttcccagaggtagtggatgactgttggatgagcttatgcatgaatatatgcttgtatggtctgtgatatgtgcttgtacgcctggttagggcttgacacggagatgtcagagaagcagaccatcagttgaggctaaagctgaggagcacggcttgccaggtaagctcatcgttctgtgatgtttttctctttctcttgtttgccgcccaagtgggtgatgggtgcatgccatgtttgaatatatatatatatgtattgtgcatgctgagaaagaaaggccgtgatggcctgttattgatgatgttatgtgttgagataagcctagaaggctggatgaatgatgcttagggtggaacccgtgctgttccagagattgtgatacatgataaaccctaggatagacactgagaaagtgtgagggtatttgacacctgtggctttaggtatggccttgggcctgagatggaggaacactgtgaggtgttccatggctttgatgagatacagatcagagaatgatctgtgatggaatctataagatactgagatggtatcggactagttgaggttccctagccagaggaagagtttgaggactccctggaatagctgagattccatgggaggtgccactgctctccgcctaaagacctaagggtggattgccttgtatggatgttcctccttaggcagagatgatgagagtcctgagtgagtatcctcaggtgattatgctgagattgataaagaccatggtggtggtctgtgttgaggataatagacactgtgatagtgtctgagttctgagattctctggccagtagaatagagtcctatggtggtaggacagatggtatgtgattgaaagtcctaagggattgagtgcctcctgtgtgagatgatctctcttaggcatgtggatgatgaccctgagggattgagtgcctccgttgtgagatgatctctctcaggtgatggatcgacagtctgagggatggagtgcctcctgtgtgagatgatctctctcagaccgtgattagaagtcctgagggattgagtgcctccgttgtgagatgatctctctcaggcagtggatctggaagtcctgaaagatgagtgcctccggtgtgagatgatctctttcaggcaagttttgtgggaagacctgagttgagagattcctcaggcagtgtatatgaagacctgagttgagagattcctcaagcagtgtatatgaagacctgagttgagagagtcctcaggcattatgtgtaagtcctgagtggagagattcctcaggcagtgtgtatgaagtcctgagtggtggactcaggccatgctttatatatatagcattggaggcggtgcctctctggtatatacagtgtccagtgattgacactgatgtttaggtacctttgtgagatctctgtcagacgattatgagagccgatgtgagatattgaagccatgattctggcttggctctgctagattgtttgagatggctgtgagagccaggatgaggtgtgatacctctgatactgagagtatctggttgtgttaccctgtagtgggttacgagagctaggatgatttcctaagctcgtttctgctttggttttatgtgtatgcttggaggtgaaccagggtaagggagaatctcccagaaccctgagtttactgagacgtttgtctcacccctgttgtgggttgtgggtttcaggtgtttccagaggagaggagatacctcagggcaggaggccctaactgagagtgctggagctggtcatgggctgcagatgaagactagaagagtctttaatttatctctgtcttgtattataaaggatagggtgtgagtgtacacccgttttactgtacatatagtgatgtatgatcagttgtggtcttgtttttgagcatgtatatgtacagatgattatgttgttgtattaaagtttaagattcctcctgattatctctttttgactttctatgttgtatctgcctgtgtttgtatgttctgttaactggatcattaggggattttgtatgttttatatggtgtgtagtatgttccatgcataatgaaatcaagaaaaacgattctttcgcttccgcaccgctattagataacgctgatagcgtgatactgatattgttgatgataacgcaccgggtgcacacggggtgttacagcttccattaaaaatcttgaagttcaggttggacaacttgcaaaacaactatctaagcatggaggtggatctttttccacaaacacacaagtcaacccaaagaaataatgcaaggtaactacaacaaggagagggaatgtggttggtttgaaggatggtggtgagaaaaagcaaattaaaaagaaggagttgtagaaaagaatgatgaaaaggaaggagttgaaaaagaaaaagataaaaatgataaagtagtgactaaagaagaagtagaagagaaagtgttaagtgaagaggagaagcagaaataaaagaaacaagcatttgacaagggcaaggtgatattgctttgtcgagacgcatcaaaaacaattttactaagctaattctgtagcatagagctaacctaggtcgactcagatacacgatcaatatggttctagcttcaattcattggtaataataagggggaattttgtcaaacaattggtatgcgtaaagtaaaacatgcaagaacacaaactaaaattaaagaacaatgcaaaaattaacaagattatcaaagagtaaggtaaaacagatgagaaagcatcaatccaattcactaacccaagcaattcgaatcatcatcattctcataagttgattctatcatgaatattcattcaatctcaatagaagcagttcaatcgattctactcctaaattaattgaaaccacaaccacaaccctaactgaactatcattcaattaaccttgtgattatcatttgaaattaggacatgaatccataatcctaactcactttcaatcctaaatgcatccataatcatgaaaacataatagaaattgaagaagaaggtgaatattcaagtagaattcgaaatactgaaccggaactccaattcttctcttgcttgagttagatccttggattgattaatgatttagccttccatgatgatcaccaaggaaagccccatgaagtgagtgcaagaaaatggaagaatagcaaaatggaaatgaagaagatgaagaacaatgaagaacaaatgagagaaaatgaagaacaagcttttgattctaaaaactaaaaaaaagaaatataaaacttgtttattgaattgtaaagtactgtccaagttttcactaaagtcactaatatattagtgactaagttctgaaaatagaatgggtcataaacaaacccaacaatctaattatttaatatttacaaccatgaacatcaaattcgcagcccaaaattacaagtgcagaggtgttaacttcgaagcttaaaatgaccctccaaatgacagaattggccttaggctatttctagaaaacttgtagatcttttcattatctttccagggactcatagaatgctccattcgaagatcggtagcactttataggccctgcacaagtcagatacgtcaagtgagcaaaaatccaaaaatacgcaacaattagcaattaagcccactgacttgcctaggccaaaaactgaattagaataggaaaataaaggtccaagagaggtcaaataagctaagaagaatagaaaaatattcaactaaaagcactctatcacaaagctgttctaaaccctccaccagtttagcatatgccttatccagatgctccgtcaaagaaaactaaggaaagacagtacaagcgtttcttggatattttcaaacagctgcagtttaacattcctttttctgaggccttagagcatatgccaacatatgctaaattcatgaaggattttcttacaaagaagaaaagatatatgaatgatgaaacaatagagttggatgtaggttgtagtgcaattattcaaaaatccattccagagaaattgagagagatcccggtagtttcacaattgctgtgactattgggagattgccagtgggaaacacacttcttgttttaggtgtaagcatcaacctcataccagtgtccatggtcaagcagataggagaagtagaaatcagaccaactaggatggctttgtagctagctgaaagaactatttagcatgcttatggcattattgaatatgtattggtgaaagttgacaaaattttctttccagccgactttgtagtgatggatatggatgatgatagtgaagttccattgattcttggcagaccttttatgaagactgctaaggttttgattgatgttgatgaaggaaaactcactattagggtacaagatgatgaagttcaatttaatgtccttgaagccatgaagcaccctaatgataagaaagagtgttttagagtggatgtcctggatgagttgatttctgatttgaagaggttgattcaaagagaaaatggttcatagaaagtattgactgaagcaattaagtgcaaataataggaatacttcacaacaaccaagaggggggatgaattggttaaaccttggtattttaaaatcaaattcaaatcagagtttcaggatctttatcactttcaaaaccaagaaatcaatttactcaatcaaatgtctcagcccaagaattcaatagatcaaaactgaacttgttgaacaatgaatgtgactcaaagaattaaagatcaatgaataagatgagaattgagatatagaaataaagacacaagcaattatactggttcacttcaaaacttgaagctacatccagtttcttccaaccaacactaggttagagttccactattataaaatttatagttcttacaagcaattacaacatctcccctttatcaatcctagataaagatcagaaatctaaaacactattagattctaagagacaaagaaccacagaacactactctgttctttacactagagaacccttctctagatacaagcaagaacccattctacacagaaattcaaaatgaaatttacacaaaaaattaaggagagagataacttgatgatctaatgaatgaatgcaaatgaattaccaaatcaggttgtgaagaacttaaactcagaacatgtttctccttaatcttgaaaacaatcttgctcaagaatcattcaaagacccattgatgttttgaatgaagcaagaagtaaaaacacttagaaaatcacttaggaattgcttgagaggcttgtgtatactcagaaatacgaattatcaagtttttttttaaataagctcagcctcaattcctatttataacataatttgtaactaactgtaatcaattaaacgcgcctaataatcgattatttttcttatgtaatcgattataataactctgtaatcgattaaactggtcaaaaaatgaaactgggttttgtaacgagcaaaataatcgattaacccaagctgtaatcgattaaaacagaagttctaaaaattacaaattacactatgtaatcgattaaatggttttgtaatcgattaaagcataaaacatatattttcaaattaagtgtgtaatcgattacaatatttggtaatcgattaaaatagcaaagtgattttccatataaagcctaagtaatcgattacaatctgtggtaatcgactatcacagaaaggcttaaaaacataactgttgcgagattccgcacactacggcaagtgcaccgatcgtttcaagtaataaaataggtaagtgagtatcgtctccacagggattggaatgaaattcacagtaattataagtctcagtaattggaagtaaaacaaaaattgtttaagagaattgttgtggattgattatttgaatataaaaacagactataaagaatagtgcagtaaattaaacaaggttgttaccaatggaaaaacaattgaggtcaggcacaatcccttttgattcctacctctttcacttaactggtttatcaagtttgctcactcaaatgatatatctttcctagtttagtaaaccctaattccttagcagtttaaccctttgacaacaatcctaattccttagcgattcctatcaagcatgtaaaagaatatagcatatggtttgcttatttctgatgactcagaaaataaatctttcctactttagttaatccctaatctcttagtgaattaaccctttaacctgaatcgaaaacctaatcccttagtgaattctatcaagttaagcatttaaagactatattataagttctgcagccacgcatccctatttctaggtaatgaacagctgttactttactaaggtcagaaattagaatcccaacgtccccattgcgaatcctaaccctcaatacctaaatagaatgaccaattctagataagaatagaacagtgaagaacagagtaaaataaagcaatcaagaaattcttattcaataccagctaagttacagaggagttcacatcagttcatggccttcccacaatacaagatttagcctgccataggcctcacgaacatcaaagtagtagaatgatacatgactgtgctgaaatcctagccttgattcttgattcccagggatttagaatgatgtttagagagtttctctggccaatccaatgtattccaagatatctcaggtcagttcagaggctttgtatttatagaataatttaattaaggtaataaagcctaaaacagtgctcaatcccaaaacagataagttaaataaggaaacaggatcttctccacgcgatccgcacggcgtcccgcactaaccgcgtggtctattcgaaagcacggcgctggtggcgcggattcccgcgcgatccgcgtgggttgttcgagctgaatggcttatgttcaggtccttggcgcgactagcgtggatgatggcgcgatccgcgcggtgcttgtggccttctcacgctaatcgcgtgaactcccacgctgctcgcgtgggatcttcgagacagtggcctccaattcttcacctggcgctggtggcgcgggaccttgaactggcttttcttctttcttttgccttgaacttcctctttttaacctgaaattactcaaatgtattgaaatgagatttaaaacaataacataataaacttaactaattctaatctattttcctaattatttaactaaattataacctaaaactaacctaaaactaaaatgtgtttgcaacacatcaataacatactatgtaatcgattacgatccttaagtaatcgattaaattcattaacaaagcagttttgtcaaaagcaaaggtcaaataatcgattaccccgataggtaatcgattacaatgttcatcaaatattttccagattgaataaaaaacatattaatcgattattaccttaagtaatcgattaatccagtgaaacttagcattttccaaaaacttttcacttagattaaaaccttaatcaatttatgaaaactttgttaaattctttcaaaaacatttagtcaaatgaatgaatgaatgcataatcatggatcaccagattaaactttctcttacacttgaaacaattatttcttcaaagcatccaagcatgttgaaagctcaaaaccaaatttgaatcaaattcttccattcttcataatgcttcccctatacccaacattaaggacaagagtgaatgtgaagataaggagagttcgaattgtcttcaacaactagatgctattaaggaaattccttatcatcaatctctctttgaagaattgaaagaagagaagcagaatgaagaatcaacgatggagctgaaagcattacctccacatttgaaatatgttttttcttgcaggtgattcacagaaactagttatcattaatgcaaatctttctgaagaagaaggaaagaaactggtgaaaattttgtagaagaacaaagaagccattggctagaccttatcaaacctcgtaggtattccttcttattgtatatatagaattttaatggaagaagattataaacttgtagctcagcaacagagacacctaaatccaaccatgaaggaagttgtcagaaaggagatggtcaagcaattggaggcagggatgatatatcctatctcagatagcgagtgggtaagccctgtataggtagttccaaagaaaggtggtataactattataaaaaatgataaaaatgaacttattccaactcatactgttaagggttgaagaatgtgtattggttacatgaagcttaataaagtcaccagaaaggatcattttccattccctttcatggaccagatgttggagagactagtgggacaacaattctattgttttcttgatggttacttaggatataatcaaatcaatgttaatcttgaagaccaagagaagacaacttttacatgtccctttgatgattttgcttataggaagatgcctttcggtgtttgtaatactcctgctacatttcagcgatgtatgctggctattttctatgatcttgttgagaagagtattgaagtattcatggatgatttctctatttttggctcttcttttgatctatgtctttctaatcttgacactgttttcaagtgttgtgttgaaacaaatcttgtgcccaattaggagaaatgtcactttatggtaactgaaggtattgtattaggtcacaagatctctgttagtgacattgaagttgacaaagctaaggtgcacgtcattgaaaaattgcctccaccaacaaatgtcaaaggcattagaagctttctaggacatgtttgggttttataggcgtttcagcaaggatttttctaaggagcaatctgttaaataaagaagcttcatttcattttgataaattgtgtttaaaagattttgatactttgaaacaaaattgatttctgcacccataattgtaacaccccgtatgcatccggtgtattaacatattacttaatcagataagtgcataattactttaattaaaaagctacggaagcgattttgaaaccatatttcttgattcattatgtatggtccgcataaacatatatcaaactaccagcttgtctcatggatcaaaacaacacaactaacgacagatacatcaacaatatctatacagatatatcaggaggaaaccacaggtatatatatacatatatacatcattaggacactcacagtgtctatacaacagaataagcaccaagtgccccgatcacaaagatctcatcctcacacgagggcaaacaatccatataatgtccatgtacaaaatataaccaaacatgtgtgcacacacacatattccctcacaggggttcaaaatacatcaacaaaacaaaacaactgagcctccaagctctccaaatgctgccaagcagctacacaggactgtctctaatggggcctcccgccctgagaccgatcatctctgccagatgagtcacctgcaaaacataatccccacacggggtgagatacacatctcagtaagctcagggctcttggaggcttctcctcctccctggctcacttccatgacacacgtcatcaaaggcatcacaatcaatggcctcccggccctcataacaatacctagccaatcatctagctctaatgtatatctgcggaactacgccgccatgatgcatcatcatcagcatcaggactctcagtccttagtctgagaccggaactcacacccgtgccatcccatcgggagctaccccttacgcatggatgcacgtatatggcacctccgagaataggcttcaaccgtgacgggaccacctatctcttggtcttaagggatcatcatcaccctttacgtgagcaaaccaaactaggaggtgcgctcttctcctagggaggtccatatctatctaactggccagaagatctattcaacaggtatccatacatacaaagcatagaattatgcatacatatcatcatgaggaatgcaacaaccattcaatacacatgcatcatgaatgcaaccatcactccctcggagtatggtggaacacagcagtgggaaacactcccaagaaaccaagaacttacctagcaaagccgtgctctgcagttcaacccctgaatgatggtctacgccactgacaccctcggtgtcacgccctatacaaggcgtacaagcataaaatcaatcaccaaaccaaccatatatggcataagtacacaacaacggtccttaaccgttacagatgaaagaaacatccttcctttccaaaacctctagtcatctatcttaaggttatcagagctaaccaacacactagacaactcatagaccctcagcggtctatctcgacctaaccaaggcactagagtctccccaagactcggtataatccataacaaagagctcaaagctctatacaggccaatatccaaaatcaacaacacggcttgaactatttcttccacacaatatcaccgttcataaagcctctaaagcacataaagagcaagaatcaaggctcatgcatgttctataatcatcaattaaccaacagactacctacacatgcacttctcagagccaagaaccaaagtccatgaaactaacatttgaaagctaatccttcatcacaacaacattctaaacatacttttctaaaggacccaagcctaattccagctctagctcaaatgggtcactattcatcccaaaatcaaactcacaaatcaaacggtaaaactcgagtttcttacctcaaagacgacaaggaaggctagtggaccactttcccaagcttgggtgtccgtgaatcgactcctttccttgccgagctcgagttttgggaagctccttagagatttcgatctctccgtttgatggtttttagggaaatatgatgaaggattctagctcatagggggattcccaacaagttttatgtttgaagggaagtgttttgatgaagtttggtgaagatatggagctttccaaactctttaatggtggaaacggagtagggaagaagaagatggctgttttggccccaaaaacgcgtaaaatgaccttatatagtggtccaggtcgcgttctggcgctaaccgcgccactattgcgccatccgcgccaagttccagtgaaaaacaggctttctagagcacttctggtgctaaccgcgccactctggcgctaatcgcgccaacttccagcatctgtggtgctaaccgcaccgttctggcgctaatcgcatcaacttccagaacctgtggcgctgaccgcgccgttttggcgctaatcgcgccaactggcaaaacctgtggcgctaattgtgccagtttcacgctatccgcgctagactctagccgtcgctaattctgtcgctaatgcttttgcgacagaattttataaatttaaacttctctttctttctttcttttatttatttagccttggttattataataatcattgccccaaattggacacttgattttgaaataatgtgtgatgcaagtgattatgctataggagtagttttgggtcaaaggaaaaataaagttttccatgttatacattatgcaagaaaggggttaaatgaagctcaaattaattatgcaacaactgagaaagaattgcttgcttgtgtatgctttggaaaaatttagatcttatttgataggatctaaagttgtggttttacctgatcatgctgctataaaatatttgctagtcaaagatgattctaaacccaaacttatatgttggattctacttttgcaggaatttgatttagaaatcaaggataaaaataggagcgaaaatcatgtagctgatcattcttccaaacttaccattgatgaggtaaccacacaaggtcctgaaattcaagaagagtctcctaatgaaaagctattccacattgcagaaaggccatggtttgctgagatgaaaaatttcaaagcagctggtgcacttcctgatgatttcaattggcactagaaaaagaagtttttcagggactctaaatattttgtgttggatgatccttacctttttaagatcggagcaaatagtctcttgagaagatgtataatctatgatgaattttgatctgaatgcagttggtgaacacatgaagctccaacttcatgaattggaggaattatggtttcaaccttatgaaaattccaaactttataagaaaaaaagttaaagtttatcatgattaaaaacttttaaaaaggaattttcatcctgggcaaaaggttttgtcatttaattctagattgagattgtttctaggtaagttgaaatctaagtggtctagactattcattatcaatgaagtcatgccagatggagctgtgatactagaagatctagccacaaagaggacattgactgtaaatgacagcaaaatcaaacaccacttgggtggtgatgttgagaagctcaccactgttgtccaattgaaggaagtctgagctacaacaaggacgtccaactaaaatgatgttaaagaagcttgggaggcaacccagtgtttctaaactttgtcttaatttgtattatttgaattttatgttttatatttttgaattatatttctgaactttatttttgaattttatgtcttatgtttttgagtatatcatctattttgttagagctaccattgcatgacctagggacaaacctatttttcaaagaggaggaaaagcaaatgttgatgaagacatggaagatcttattgattatctcatttgaggagactgagctcctcagccatgatcttaaaaaatatgtgacattgtctttatgtttctttaccgctttgtattaaaattcaatactttatttccttatttactatgttggatttttacttgaatagttgcccgcgtttatgattgtttttggtattgcgctctttgattgtgtacacagaggtttacctctttttggtagtatacattattgattaattttgttttgttctattaatataattgaagaatatgtataactctttttgggacttaaataattttttttccttggacataacatgttttggaaagaatcaacagacagtgtttttgaaacttgcttttgaattggatcagaacacaacaaaatgatttttggaaactttgagaaggaaaaacaatgaatgactttcccaaaaaccaaattaaggcagatggttttacatggacttgataaagaacaacttttgaaacactgatttgatttgaacatggaaacaggccttaagctttaatgactgtgtgcaaccataaaatttacattgagtggcctcacagatatattctatagttaattttgcatgaatttctaattgtcataacatatgatgcatggatattatttaggccttctttctttcttgtacattttaagccactggccacaaagtcatcctaatgtatactattttaccatttgcaatccctttgggccaaatacttgatattttgttggaacactaacctaggataagagtttcctaccttaccttaggttaggagagcaaagaggtttgttgggaacttctatcattaggtggctaatgtgatgtatactttgtttttaaatgtggctattcatgtgaactaaattttgtatagaaaagaaaagaaaaataaaaagaagaaaataaaaaagggaaacaaattctttgtgaataaataaatgcatgaattatgtacattatgttctgaactgtacagagttgttgtaaattctataagttgggtgactgagatgttggtataggagatattgataacttggtagaaaaggttagagataggaagtgatgatagcttgtttttatgtttgctctcctattcccagggtaattctgcatatccaaaaaaaccaagatttctttcaagcagggcccaaccctaaaagtcctaatgatccatgataattatgtacttttctttgatttgatgggaaatgaactgcaacattgatctatgacatatcagtgatggaattgagatgaaacacttgcttgtgtaagaattaaacacctttgagaggttttcctctgtttgagtcaatcaagtgttttctctgatgttctttagaaataaaatgtgaattgatcttaatctcattttgcgaatttcatcttttatatattatttctcattgttaagtgtttaaaaatgttgttatgaacactttggaggttgattctttacaaatcatgttcatagtttttggtgtataaagtattgaagcatgattagttaaccttctgttatttgtggttctatttctatacttttcttgaggacaaacaagattctaggttggctgtagttgataagtgccatattttagttatttttgggattataacacttatctattgatttcagtagttttattataaacttcccttaattctagttgttttatattttttacatttataaatgttgttgtttaaatttggaatattcatccatgcaattctaatgtttcgataggtatttgttggataaagaaaccaagcaagatgaagggcaaaaggatcaattttacaaagttccagagtgaaattcgcccaagctagcattcagctagcctgggctaatgagattacttcttcctgaagcaaccaactcgcctgggcaagctaccttacttcagccagaagtaaccaactcgccaaagcgagttggtctggcacctcttgcaccgtttgctataaaaagccatgcaaatggaggaaatagagctcctaatgaaccagaaccagaggaacataaaggataacgtaggaagaggtgagaaaagagagaaaaagagaagaaatcatgcaaaaaaagatcatggatcgcttccttcgtcatgtcttctgttgatcttgtgctttacacaatgatcgactagtttctttaaaggattggatgtaatcttcgtacccttatgtatctcttttgatatttgatatatatatatatatatatatatatatatatatatatatatatatgaatcttttctactcattactggtgatttcattatgttcataatgcttgattctacttgatcactagtttcatgaaattggattctaagtttgactggaaagtgcccttagaatttgaactgaatgattttactctttacgttacgttgctaggaatagagcataacgttttgattgcaaataacacaagattatgattgtaatgctgggttatttacttcatatgtgaggaatcaatattcatccttaggattcttaaatgaaagggattggttcgggatgaattaatgtgtgcatcagtaatgttagaaaatgatttatatgtgttaatgttaattggatactgagggtatgaacggtgaaatccaatcctacatttctcttgaattaattaaattcgtttaaattgttttcgtaatttttgtattttggacgcactaaatcaattgttttcgtatttttgttaattatgcaattctattattttcataaacccatgatgttcctatcaactttattgttcataactattcaactgttacttttatatggaaaaactgagtagctcaagtccatgtggagatgatctctttataaatcctgtaacatgcgacaacattggtacgtttgccaatagtctaacagcatccttaggagattttcgataagcccacaaagtttgtcctaaagtttcatgccaattcttggctttgtaccaatgtttttttaaaatcaaacctattagtattttattaatggcctctacttggccattgacttgtgcaaatagaagttaacaattttatgttccttaaatcaacatatcgaactacattttgaacattcccattatcaatagttatggtttctggaattccaaactggtgtataatatgctcttcgatgaaatcaataatatcactttggttaacatcttttaaaggaaaaaattccacccatttagtaaagtaatcaactacaaccaatatgcatctatgctcttctaacaaggggtgaatttggctatttagatacattgcccaccctctaaaaggcaaaggtttaagaatggaatgtaattcaccagtcaaaacttttcacaagattttgcacaattaacacaatctttcgaaattgtgagccaataaactcctaatttaaactaggtgcatttcattttttcaccagcttggtgagatcctcaaattccttcatgtacctctgccaagacaatgtaagcttcaatttctcccaaacatcgaagtaatgtgccatcaatatttctcttgaacaaaatgtcgcccaatatgacatagttgacaactttatattttatcttccgatcaattggtaattgaggattcatgagatattcgattaaaggtttacgccaataatttgaagacaaagtatcaatattaagtacttcatattcatcaattaagttatcttttacttgaatcaaagattcaaatttatattaaatttttagataacttatatcctgaagcaatctgagccaactcatttgcttctacatttcgatctctaggcacatgctcaaaagaaatatcatcatatttctcaattagtctgcatgctagagtaaagtaatagatcaaattggaactaatacatttatattttcgcacaacttaattgatcactaattctgaatcccatataataacaacatttctttccccctagcttattacagtctctaagccaatgatcaaggcttcacactccacttcattgttcgaacaaacaggccttacgtcaaataataacttagtaggaacattgtttgggaaaattataaggatcccaacacctgatcctctatcaattctaaaaccatcaaaatataatatccatgtttttatatcaatgtaaatttcttcaattcccataaatgtatggtctaccatgatgtcaacaatgacttggcctttgaaaaatttcaaagttcaaagcttaaataaaattcagtcaaagctaatgaccatttgccaatctgattatgcataataggcttagacaacaagtgaataagataataaattgcatattttgttccattttcaacaagagaaataaagacgtaaacatagtttttcaataggactatatttattttctgcatcattcagaattcgaataagataataaattgcatattttgttccattttcattttttttgagcaagcatgctagcaatgaccaaatctgatgttgatatgtataacttcaaaggcctatttcttactggtgggaccatggcaggagggttgattaaatactcctttatcttttcgaatgcattctagtacccttcctcccatttaaaataatcttcattcttcaatcaaagtaaataagaaaagatttgagtttttctgacaggttagagataaatcttcgaaggaaatgtatcttacctaacaaggattgaagttgtttcttattcttagggggagaattttctattactaccttgaatttattcttatcaatatttatgccttgctgatgtatgacaaatccaaggaattaacttgcagccacaccaaaagcacatttgatatgattcatatttaatccatgtttcctcattctttcgaatgaagtctataataaccatggtttctataaataaaagaaaaagttactgtagctggcgctccgagcgtggcactgtagcagaaggctattttatgtgatttttggcgccatcagcgccagagtggcgccaggagcaccacagatgctggaaattggcgtcaggagctccaaaatggcgccaagggcgccagataccctggattttggcgccatcaacgccaaagtggcgccaagagcgccacagatgctggaaactggcgccaggagcgccagatgcactggattctggcgccatcagcgccagggtggcgccaggagcgcggcaatgtcggtgaggcttagtatataaaggccacacgtgatttctggagagaaacattgtttctcttcttccgtagagctcccacctccatttttgagtgcccaagctccctagaatcttgcttgctagccaaaatcacttccattagccattaaacttgtgaggaaaaccgagaaagctaaaatccttcatccaaaccccttgaaaccttgagttgagagattcctctctcagaggaattgtggaacttgagctaggcaaggaactacggagattcaagaacattggggccaggagagacggtccagaggtcatccttgccgattctgaggtaagaagctcgagttttcccgattgttttgtgatttgggagtttatatgaatagtgacccatttgagttggggctagaattagcccagggtcctgtagagaaatttgtttagaactgtgtagtgatgaaggattagctttcagaatttgatttggtgaactttgatttttggctctgcttatgaatgagtgacttgtgtagagtcactaactgacgattatatgacatgcaagagccttgattgtaatcgtgaggtgcctgagaggccataggaatggtgcctgatgaatgacatggaccgttcaagttataactggaaatttagttgttgagccgatgtgagctttgagctcactatatgtaattgatattgagtctggaagtgactctaagccttgattgagctgtgagctcattgtatgtgaactgcatagagtctatggtgactcagatgcttggattaagcggtgacagacccctgagggtctaagagaagcctagtgtgtgctgggctgtcatgaaccctaagatagaggacttatgtatatgctagtgctgaatgtatgattgaattggttatgatctgtgcatacaagtattgattaggactggacaccgagggtgtcagtggcaggtgccacggatcagggagagaactgcagagctaagctttgccaggtaagttcttggtccctggggatgatttcccgcttgtttgtgccccaccacactccgggaggagtgatggtcatattcatgatgcatgcatttggttgttgcatcctcataatgatatgcatgtgcatctctgcttgcaaaatgtatgatgcctgttattagatcttctggccagtaagatagatatggacctccctaggagacggctattcctcctagtttggtttgctcttcggtgatgatgatcccggggtgatgatgatcccctaagaccaagagataggtgtgtctcgtcgcggttgattgcctattctcggaggtaccatatacgtgcgtccatgcgtaaggggtagctcccgatgggatggcacgggtgtgagttccggtctcacactgaggttaggcattgatgatgatacgccgtacatagagcaagatgacttgctcatattgttatgagggccgggaggccaggtcgggaggccatttgttgtgacttcttgatgtttgtgtcatggagagtgggccagggtggaggagagacctccccggaccctgagcttactgagatgtgtatctcaccccatgtggggattatatgtttcaggtgactcttctggccaagaagagcagtctcagggcaggaggccctgatggagacactgcatgcatggatagagatagcatgaagagagctagacaactcattttgctcgaatgctgtgtggagcttattagtaccctgtagagggctgtagggcgtgtaggcccatttgatgcattgtatatgcttatatacccttgtgtgagggaaggtattcttttgttcaccacgggtgtggtgtgaactgatgcatatatatatacatttgtacagaatgggttatgtaatgaaaatatatttcctcttgagtctattatgaaatggtttagttatctgcctatgaatatgtggtgataaactggatcagcaggggcatgtgctttattgatgggttgcttgtgatgattattgaattgtgtgtgtattgctatgtttgataatccatacataatgtaatcaaaaaatacggttcaatcgcttctgcatagttttcaaatgacgttttaagcgcgattctgatattattaatgttaatacaccgggtgcacacggggtgttagatgatctaaatgattttctttcttttcttatttaactacaacatcatctatgaatacttgcatataatctcctatcaaatcatggaaaataaaattcatagccctttgataggtcgcacttggattcttaaaccaaatggtatgactgtccattcataagtgcctatggcatcggggcatcgaaaaactatttttgatacgtcttgtttagcaatgtaaatttggttataaccagaataaccatctaatagactaagcatctaatttcttgctgctgaatcaaccaacatgtcaacaattggcataggatactcatctataggggttgctgaattcaaatctcaaaagtctatgcaaacacacagtttaccatttttcttactcacaggaacatcattcgaaatccaatcaacataccttacaattcaaatgaacttggcattgagtagcctcttaatttcctccttcatcttcgaggggttttctttgtgggcttcttgccttcttgaatgggtaacctttgctcaaccaaatccatactaagactaggcatttcatcatgcaaagcagtttttaaactcatgtggcaatgaaattattaccctcctaagatttccatcaaagaatctactaatgtaggttggtcttcgatccatcttgtatcctaaatttatttcatcaagatgatcttgggcatccatctttttgattggtggagacatggacatctcaaatcaaaatgggtaattgtcataaatacaatcaagtctttgatcgacttaattgaagaacttccaacaacctctctttgctcgaaattatctgtagatgcatcatttctctgagttctctcaattttgagcactatgtgactttttttcgatgttttcatcttcgatggcttcacaagccactcctttgtttttaattttggctaagttagtcattccatgttttgatatttcttcttttttttatctccataagcctcaaaatccatacctcctacctgattcgaatgctcttttgaatcaacagccacaatggtcgctcttaacctattttcaactatgtaagccaaaattcgagcataatagttactcattagtattattttccatttcgatgaccttatttttccaaattcctccatcctcagaattccactccataaaagaagaactgcttcccatcttgttgaagtcttcgacatctttaatctgaacgggttgttattgtaagtggcttattaggtccctctgcaatagatacgtaggactcataaatatcttgatcaattttgaccatttcaaattgaccatccttattaaaataaacaatttttgattgactgtctgaaaacagtatgaacaacacataagaaccaagaggggggtgaattggttgattttggctagttaaaaattcttaaacaatcagagttaaaaagattgtattacaaaacaatctaagaaagctttcaaccaatcaaacaccaaaccttaaagaatgcaatcaaaactttttctgttgattgtgaaatgctgcaccaacgaatgacaagttattaccataagaaaatataaagatgaagtagtcaatacaaagatttatactggttcacttctcaacctagagaagctacatccagttcttctaaccaacaagttagagttccactaataacaatctgtttcttacaagcctttacaaccactcttaatcccacctagatcaagaacaagatatcttactcacatagattcactgtgatcaagacatagagaaaacctatctctactcttacctctagagacacctattctagaaaagccttaagaaaactattgttatagttacacaaataaattctaaaagaatttacaaacaagttttatggaaagaaaccacctgatgatccactactgatgtatgcaaaagagtactagacttgaatcaatggtgaaagaaaaatacttcaaaattttccttccaaaatcttcttttgaaactttgcccaaaaagaaatcctctttagaaatcttgaaacttgaggatttatgggtctaactcagaatatgatacaatcctaaaaccaaggcaagcgaaggaagacttggaattacacatggaggcacttcctttggtgattaaagggccaatgacaagggctagggctcaaacactccaagatcatatacaatccagcttatatctcttggagaaccatgaagaaggctacaaaatgttgagcttatctgttgtaatcgattacgagtagcctgtaatcgattaaatacacttgtataaatattagatttataaatagctctgttgtaatcgattattcgtcttgtaattgattacatgaaagtgggagtcccatgtgataatcgattatttggtgaaataatcgattactttgttcgtgaatcagcttctaggcatgatatgaacaaataatcgattaccaagatctaataatcgattatttgattcaaaataatcgattaccattacgaaataatcgattaaagccgttctttctgtagaagcgctatttttagatttaaaaactgttttggaaagcttgtcttggaagctacgtatgggtttcatttaggaggcatttacatttcatttagcttgtagattcgtggtctatataaaccacatcacaacagattgtaagaacttttgattgaatgacattggattttgtgtgtgagaggttgagagttattctcccttgttcttagtgaagaacttcttgtttcttatcaatagcttctgagctattgtggtgattcttgcaagacttattggaattcctattccatggtgtcaatctaaatccacttctattcttcttccattgttccaattcttacattacaaattcataaaatgttgtcataaaacagatcattcatactctgtttttctttcaattgaagaattgattccattgcaaggaagatcggggcaaacagaacttgattcagtttaggagtccatcatttggtatctagagcttaaaccttgtggaattcttcttcaatttcagttttgggattcttcaaaggtaaaattctgcattagagtcaaaaacgaaaatccttagtaattccttgtttcttgatgttttcttctgattcttagtgttgtagttttgttaagtgttatgttataaaaaccctaggttttcttcaagtttcctcgtgaggagagaagaggaagataggaggatgagaagagaacataaagaagatgaggataggaggatgaggagagaacatagagaagatgaggataggaggattgggtggagtaaaaataaaaattccaaaattccttggcactaatgatcctaatgaatactttgagtgggaaatgaaggttgaacaaattttctcatgtcaacattttgaggaagacaagaaagttactcttgcaactatagaatttggtggttatgctttggagtggtggagccacattcaaagagatatagttgggcaaagaaggcaaagagtaaattcttgggaagatttgaaagcaagtttgagacgtagatttgttccagcttattattcaagagatgttcacaatcttcttcaaagacatttccaaagttccaagagtgttgatgaagattacaaggaaatggagttgatgatgattagagctggaattgtggaacataaggaagcaactatggctaggtttattcatggtttgaatagagaaattcaagatgtggtggagctatattcttatgacacaattgaggacctagtgcataaagctcaaagggtggaaaaacaaattaaaaggaggaaaatttcctattccaagtctagtgtggctgcaacttcttgttggaaagacaaaccaaaaagggagagttctcaagttaaaagaagagaagagaaggtagaaaagccaactaaaaagattgaacaattaactccaacaaaaatgggaagcatcaaatgcttcaagtgtctaggaagaagacatattgcttctaaatgtcataataaaagaactatgattttgctaaaagatgggaaggttacaagtgaatcttcaagttatgcatctagttcttcaagtgaaaaagaaaaggcacttacacttgtggaggcgaaagagggagatcttttgatggttagaagaatgttgagtaatttttgcctagataaaggagaatcaaagagaaaatatttttcacacaagatgcttggttagagacaaagtatgttcactcatcattgatagtgggagctgtactaatgtagctagcacaagaattgtggagaaattacaattgccaaccacaaaacatccaaagccatacaagctacaatggcttagtgaaagtggagaagttgtggtaaattctcaagtgctcattcctttttctattaatgcttatcatgataatgttctttgtgatattgttcctatggaggctggacaaaatcttcttggtaggccttggcaatatgataggaaagttttacatgatggcaaggaaaatacttttgagtttgagcataaaggcaagaaaattattttaaggccattgactcctagaaaagtgtgtgaggatcaaataaagatgaaagaaaagagaataaaagagttgaaaaaaattactgcacttgaaaagaaaaaaaagagtgttgtacaaaaaggaaaatctagtgagaaaaaaagaaaggaaaaagaaaatagtaacaaaaaaattcatgagataaaagagagcttcttcttgagtgaaaagtatacatgttgaaaagcaaggtgaaaggttgcccaaacctatgcgatctcttttggaagagcatcaagatgtttttccaaatgaaattccaaatggcttacctcctttaagaggtatagagcatcaaatagatttgattctgggttgttcacttcctaataggccagcctacaagattccaccaatggaagcaaaggaaattcaaagtcaagtggagaagttacttgagaagagcatgagcccttgtgctatgccaatcattcttgtgcctaagaaggagggaacttacaggatgtgtacggattgtagagcaatcaataacatcaccataaggtatagacatcctatccctagacttaatgatcttttagatgaattacatggtgctactatttactctaaaattgatcttaagagtggttatcatcaaataagaatgaaggaaggggatgaatggaaaacgactttcaaaacaaaatttgtactttatgaatggttagttatgccttttgggttaactaatgcaccaaatacttttatgaacttatgaatcatgtccttagacatttcataggtaaatttgtggtagtatattttgatgacattcttgtttatagtgctaatttggatgatcatttaatgcatgtcaaggatgttttagaggtgctaaggaaggaaacattgtatggagctattgataaatgttctttttgcacttcacaaggtgtatttctaggttttgtagtaggtgctcaaggagtccaagtggatcaagagaaagtgaaagctatcatggagtgaccaactccaaagaatgtgaaagatgtgagaagtttccatggtttagctagtttctataggagatttgtgaaagattttagtactatttcttctcctttgaatgatttaatgaaaaagaccatgaacttttcttgggagcaagagcttgagattgctttccaaacattgaaggataagttatctaatgcacctattcttgcattgcctaattttaatgcttcctttgaattagaatgtgatgcatctaatgtaggtattggggggttttaattcaagataaacatcccattgcttattttagtgagaaattaaagggtgcatgtttgaactattccacttatgacaaagaattgtatgcacttgttagagttttgcaaacttggcaacattatcttttacctaagaaatttgtgatacatagtgatcatgaatctcttaaatatttgaaaagccaaggaaaactcaacaagagacatgctaagtgggttgagttcattgaacaatttccttatgtaattaaacacaagcaaggaaagttgaatgtagtggcagatgccttttcaagaaggcattgcttgatatctatgcttgagactaaattgcttgattttaatcatatcaaggagttgtgtgtaagtgataacgacttctctagtcactactacaaaagtggttttttaggacgcaccttctaagacggttctcaaataaccgtcttagaatattgagcggtgacagttttgtaaataataagggatatgcaaacacggttttattaaaaccgtcttaaaatcaagtatacaaagacgggtttgtcatgaccatcttaaaaagtaaatattcaaaaataagcgttccaatacggtttttcaaaagaccgtctttaaaatttgtagcgtttctgcttattaaatcctctccgtcactctctctcctcaaagtctcaaacccttcttttccattctccatcactctctctttctctcctccaagctctcccgctcctcggcgtaccaccaccgcgtggctgaccatgtgtatgacaacggtctgtcagtcttataagcctaaacactcaacttccctacgaggccgctcactctctagggtttttgttattctcttctctcttctcagttttcgattttcctctttacttccctttcaatttaaccctatttttctcctctctaaaccctaaagtcccttccttttcaatttccccaatcttttgaaatcattcttcgaaccctaaaaacatctttaaccgattttcgttttccctttgcaaattcaccgtttaaattgaattaatttgcctgattttcaggtttttccgaaaagatgtcgcatgtgtatgttggtaacttggattcacgagtcacccggccagagagatcttgaagatgaataccatttttttaggagttattcggaggtaaattaacatgctttaatatttttcctcttaatttctttttcaatacttcaatttctcagttttggttgcagtcatttgttttgtttggctgtttaggtttattttcgaaaaaaaaaattgagaggtctagacacagaatagtgaagtggtccactcactatacagttatttcaaggaagactatctcgatcattttctagaagtggtagagagttggaaaaattatattgtaacttagcttttggtgaataatttatccacttgctatagtttattcctgaagatgtgccactgcgtggtgcaataactctgttttgaagccagtattagttttggttgcagtgaaataactctgttttggttgcatatgtacatactcttggtctttccggagtgggtatgtaaattctaaagttaattttttgatccattgctagcttactagtttgttaaatattggacttgggcaagatggttaagtatttaacacgtacgattgcttttgtttcattgcatgccattctaatgatttgtgatagtgaaacccctcttgtgatggttgtgttttcgctcaatttctattgcttcttttttttttttttgtgaagattaattggggttaaataataataataataataataataataataataataataataataataataataattattattattattattataataattcttgtgataaaattgactcttgctttatatggggtgttttataattaatcaaattgtgtgaatttaattatgtatgtatttggtagacctgattcagtcctggatgagtgaacttcctaggtaaagatagttgggattttgatatagaaatcactggctgcttttatttaaaatttattttaagtatttttctcattcaaacccagggtgagtagaatgaattnnnnnnnnnnnnnnnnnnnnnnnnnnnnnnnnnnnnnnnnnnnnnnnnnnnnnnnnnnnnnnnnnnnnnnnnnnnnnnnnnnnnnnnnnnnnnnnnnnnnnnnnnnnnnnnnnnnnnnnnnnnnnnnnnnnnnnnnnnnnnnnnnnnnnnnnnnnnnnnnnnnnnnnnnnnnnnnnnnnnnnnnnnnnnnnnnnnnnnnnnnnnnnnnnnnnnnnnnnnnnnnnnnnnnnnnnnnnnnnnnnnnnnnnnnnnnnnnnnnnnnnnnnnnnnnnnnnnnnnnnnnnnnnnnnnnnnnnnnnnnnnnnnnnnnnnnnnnnnnnnnnnnnnnnnnnnnnnnnnnnnnnnnnnnnnnnnnnnnnnnnnnnnnnnnnnnnnnnnnnnnnnnnnnnnnnnnnnnnnnnnnnnnnnnnnnnnnnnnnnnnnnnnnnnnnnnnnnnnnnnnnnnnnnnnnnnnnnnnnnnnnnnnnnnnnnnnnnnnnnnnnnnnnnnnnnnnnnnnnnnnnnnnnnnnnnnnnnnnnnnnnnnnnnnnnnnnnnnnnnnnnnnnnnnnnnnnnnnnnnnnnnnnnnnnnnnnnnnnnnnnnctttaattggtgtattactagcattggttctggtaattatgtgtgtatatatatcaagtttaaaatggcactattgatgatggtaatttgaaatgatgcatcctatgagacaaagtatgtgattatttttttgggaatttgaaaaccttgtatcattctgttcatcagccaaaatgtgaggtatgtcaaaagcactccaaatcttgagtctccgagggaacatcttactggttagtcatttgtgcattctgtttatcagaacttttaggatttgttatgatgatgaacaaaacaattattttattttcccctttttttcatatacaagttgacaatgtgtttttatgaattactttttgaattatatagttgttatactgctcagttttttttgttatccaaaataagtttccagactttaaatatccatactattcaatcgcttagattccctcagagcaattcaatcaggagttatctttgattggcaagattccctcaggtattttcaatacaatgtttgaattttctgggagttgggaaagagatgcagcccatacaaagtcccttgcttttgatggggtcttaattacactttacactgtcgcattagagaagtctcagatggtcttctgtgaccatgctctaagctcgaatttctaatcaaatcaggactgatttggatctataatctttcttcatatagtttttgtattttaaatttttgtttgtattggttgaatgcaccaatcatgtgtagatgcaacttaaattgactgtctttaaaattatttaattgtattaggataaactctacacgtttatctttaagtttattattagtttgagactctggccaactgttccatgtaacttagtctgtgccttctgtacctaataaaaatgtttatcttgaagtatgtcattggttctttccaatatagagtcttgttgactagtctgtagaggaagtatttgatatatgcgtttcatgataattcaccaaatggaattccttccctcatcccttctttttcctagtaagtattaaatgatgttgaatgcttcttggcttaatgttatcgaaatggatatagaagagggtcataaaattcgtaaggagtttataaatcatgcttttgatgacataatggaaaggttaaatggatttggccgaatggaacaaaatggaaaggttaattttaatctgctagcttcgtactttccacatttgatctcgatcacctaggtgtctgtgcaatttgggtcttcgctgttcaatgttggcattttcattgtgcaattttacttcttccccttttagtttataatccttgatcatttcttgtttttaatgtttaatagttctctttaatgctgagctagttttagcttgagagtggaattaagcttcaagggtattgaaacaccaaattagtgcattcaactatacaccacaagatagcaatccctcccttattttcttcccaaattgaaggatattgacagtattggacaacatcatatgatttcgttttcccgttccccgatctcgtgtcattagagggtttcatttccgtttgtgttctatttgagtttagatccattcctgaatttctatttctctttgagatttctattgttataataagcataagcataataattatatatgttttatcctcttttgtgttttgtgggttcaggatctcgataaatggcaaccactgcctgtttcatcattagcagaaatgaacattcctatatatgaagctgaagttggagtagctgctaaagtatgcttatttatattttagtttaatttttgttgatttatcaaatttatttttacttttgaattgcttcttgctagatattggtttttctgactattttaggtggattgattgaccactcatgcatcaaatttaagttatgtgatttttttagcctaattagtgtctgaaagattattgattagccaaactgaataatatgaattcattctcaattatgtcaacttggtttatccaatcgatataatttgtaattcttgtttgattaaatgacacatcttgtcttgtagtacgtagatcgacctggtgttagttttgttctagaactacttatgatgacaatgcaataacaaatgctgttgagatttatgatcatccaaggtcttacttctttgccctcctatttttcttttattttctctatttatttaggatctttagcgattcatatggtgttagcaactactccttacacatctcaaggtggcatactaacaattaattgatatcccagtggagctgttcatttcatggcttcaaataatgactatggagttagagactttgacatggaaaggtttcagcattccaagcatttctccctctcttggcccgtaaatgtaagtaatatttacattttaaatttttttatttgctgtaaatttttttattttgtgaaaatccctgtgggatttgtttttttatcatttaaagtagtgtaatttggctatcaatatgccttgaatcagtttattaattattaatgatgggtgaagccaccaaaatggactttaacttgataacctttttttgcactacaattaaggaacttcaaacaaaatagtagaataatgatggggaaattattgaagtttaaaaaaggagagagaattgtgagtatgtctaaataattatatttttttctctctacatgctcattgccatgcacgctgctagtgttggaaaatatgatattaagccattgtttgtttgacatcttgggctgctgaagcctaatgctggtaatgggttcgtttggcccaaattttggagcacaaatatatgaaagttggtaaaacttaaaagtataaaattaaagttggtattttagaaaatgatgactaattatttttttacaaaataacttttataaatgttaacctacataaatcatttacaaattacaagtgcctggatactgtatatcagttccaatatcttctcctttatgcagtatatgttttaacatcaaaaaaagatttttaacatctatttttttaatacaaatgcagacaccaacacgactctaggatcccacaggtcaacattacttactagtttactctaatataatgtactactctctagttcactaatttaatgctagaagggagggtcaaggtctatttttctctctctatatatttttttttttgtgaagtaaataaaaatggagaaaaatataaaaaatggaggaatgtaatagaatattttgatgctataagactgaaaagtggcttggatgcattgagggtgaaattattggttgggagtggtaggacacctgggattgcatacatttttacaaaaatattttgtaaaaataaaaaaaaaaatccttccaaattaccatctcaactgctatgtatgtgccaggttagattgagtcaaaagtcatgtatcatgtaattgcttaaaaaatttgccctcctcttccatgagtcccccttctctatcaaataatccaagtttttctaaataggaactagtgtgggaatactggtgtagtgcaataggaccttgtttgccccatgtggttttgtgtacttatctgtactgtcttttactgccatctgtactaccttattatagcatgagatgtttttaattacaatccttctaaggtccctaagctagaccagtcccttagttgcttgggatttccactcccggtcctgtcatgtttggtcttgatgtcgagtgtagtgacccccatctttgggtcgactgatccattttataaagtttaggtagactaaggcatgagacaatatatagcccctcaagttttgagtcatcattatgatacttatagttttatttagttcattagtcatggcacacaagattgatctttgattctgatatggttgttgtgtcataaggtatttcttatttaatcgtagtctaattaaagtatttccagttgttatcagtcttttaaggaaatggttgctatgtgcctggtgaaagatcaaacaaaaaggccatcaacagagaagttactgaaacattctttcttcaaacatgctaagcctcccgagctctctgtaaagaaattatttgctgacttaccacctctttggaatcgtgtaaaatccctcgaggtgggctttcatgccgtaggcttgggtgcaggttttaaaatttctatcttcctgctactttttcttgactttacgaattattgcagctcaaagatgcagcacaactaccagtgatgaaaatgccttctacagacgaattcaaaatatctcaggtaaaagctgatgttcaaatgtttatttgttacatactgtgatatgatacgagagaactaaaccttatttatactaatcacaattctaactaattagggaattaaatcatgataaagaaatatgataaccccacaaatgttcaaactgatattgatcaggcagaaacatatatcaataactcttctagcacccttgctgataagacaaaggagaagtcagacaacatacaagatctcttagattctgcgtaatgattgattataatgttttctgctccaaatatttgctttttgctttatcttttactctataatatgaacatgagtacctgacactgatacaggaaagtgttaacatttcttggctttcttgagtcccttctatactcccaatttggatgcagaagttattatttgctatggtattcattttcttttacttgttgtaacaccccaaaaatttaattactaagagtaaaatgttaatgaaagacagtagaaaaatttaaggcaaaatgacaagaacgcccctgaacaatttcaaaaatgacgtttatgcccctagggtgaaaatgacaattttgccctgaacaattctggaaaggaccaatgtatccctagatattttagtaagatatttactaagagaaattacaaaaatatccttggacaattgcaagaatgacagataggtccctgaggcaaaagaccaaaatacccttaggtcaaaactgacctagatgacttcagaaattaatgagaacctgagcattagataaaatacttttaggtaacaaattattagcaagattggtgataagaaaccctaaattgtgatttctagggattttggaagacaagttgaaaagagcttaatctagactaccctaagtatcagaaaattatcagacaaatatggacatgatctagagaattttctcttaattatgaaaggaacaaatgttctaaataaattagtttagtaattttgataattagaggcaatatggaccgataggaaaatagaattttactattacatacaataaaaggaaaattggattaatttggaatcctagattaagccttgaccatatgatgcaagatcaatggagaaaaactttaagaagtttcaagattggccacatggaagattaagaagcttgaaaatttctattggtccaagtggaaagctagtcataaatgacttgaagtaaattttattttgtctcctttagccaaatacgtgggcaactagaaacattatttccacgatcccaacggtcaaaagttagatataagggttaggaataaacctttaaaattttaagaagatccaacggttaacgagcccagaataattattttacagaaacgggtttttccaaaaaagaagcaaaataccaaaaactattaaggcaaacttaccctacaaatttgaaatggaatatgcctagatccagccaatacacgtgcaatgataggtgacaaaggaaaattgtagaaaactcttgataaaagacacttgtaaagccttaatacattagccaatgaaagaagtccaactaaaaagctaggcaatgatgaggtcttgtgatattttcacataaagccaaggaaactagcctatataaggaagcaaaaggctgaaaatttggacaagctttgggggagaatacaaaccgtacaaaaaccagcctaaaagccatttcttttctcattcattaaaccacaaagcaaaagcctaaaacacctaggaaatccacgtgaaggtactaagccattttaggagccaaagttattcaaattcaagaaaagaagctaggagcaaggggctgtccaaaaagcttaaaggtatggggagtattttggtaaacatggattagatagttgattagactaatttaacatccaatcttttaagattaaagtcatgttcttgcttgttttatgaaactttaagttaggcataccatgtgtttgatgaaaatcctcaatgaatttaaataatatataggctacgttttggatacctaattagttttaaatgaaaaaagataattaatataattaattctggttagttaataggactaattctatttggtagtatttgtaattaattatttgatgttgattgtgttgatcattccatgtggctggaagtgaatatgttgctgtatattagttactgtatgtcattttattaggctgctgtatgttgttggtgttgtatttaattaagttgctgtaggtgattttatttgttgatgttgctgtatgttatttcaaggagatgctgtatgctgtaaccaaagtggctgtatatttaattgctgtaattaaataggttgctgtatttaataattgacgattgctgtatgttgctgtatgatttattatgttgctgtataatgaattaatgattctgtatgttgagctttgttgagattctgtaacaaagatgatttaagagtgagttgctggttattctgtgttccactggagtgggtgggaccatctgatatgtattccactggagtgggtggaattagttgatatgaaaattgaaaaaaatgataaaagaggtaaatgaaaataaaactagccattacatacatcatttgcatttatcccctcggagcggagggaggtctcactggagtgggtgggactgttccactggagtgggtggaactgttttatggtaccttttttttatcccctcggagtggagggaggtctcactggagtgggtgggactggtttcactggagtgggtgaaactatattgattttggtacctcttattaggcctctgagatctcagtcatgcatcatgataataaagaaagcatgcatcattcatcaggcatctgtcttataattaatatttagttttgattatttatctgtttttactaattggtcttataattatttggtttgattatttatctgtttctgtcaattatctaattctgtttattaaaatacttacccgagttgtgtctgtggttgacacctgtgatgaccccaattaatttgggcgagcagaggaacagtgaaagctgagatatggagaagcttggatgaattatatgctgtgttttgacttgatgtatggatgatatcttttgaagttgctgctttttggagctatgtaattcgtatggaactatgttgttagtggtctgtattttattttggatgactgtacacggactgttatatttaactatacttctcattataaataaatcgtggtaaggataatcatttatgttacttacgaatcataaaatcagcaaacaaagcgaaaagaattttgtgaaaaatttataccaatctaattttaatgccaagtggacacgaaattttaattaaaatcaatcaagcacgagtgagaaaagagaggcgttatacttgttactacagtattctcatttttggtatacagctccttgtgtatatggtgctctgagcatttgttacgtctctttgttcaggcttgcatgaaatttgaagtttagttgccggagttatgtcatggttttgtcaaagtctttttttgtagagctttattattatgttatccaatactttgggattctaattactggtgccttttttcttgatttaaattttgaagttaagttgcccgagttattgttttatgcttgcattgaagataagacattgatggaacttcaaacacacttgattgattttctcaggtttcaatgttttcgtcctagtattatgttagaaatagtcactggtgttgaatttaattgggaaaatattggcattttacttaaaaactttgatgcaagctagtattatgttagaaatgagtccatagatagaatccaagtaaaccggtgtaattggagatatgactatttaaaaaaaaattgctttttattttttttataaaaaagcattctaagacgattctttaaaaaaactgtcttagaattctgtatttttaatttttaattttttatacattctaacacagttgtttgaaaaaccgtcttagaatgtatattcaaagacgggtatgctgtaataaccgtcttagaatgccttcaaagacggttatacggcataaccatctttgaaggtgctcctaaaaaataaaaataaaaaacagattctaagacggttatactttataaccgtcttagaaagcagacattctaagacggttatacagcataaccgtcttagaaggtgctctcaaaaaaaaaaatcgattctaagacggttcaagaaccgtcttcgtaggtccaaccttttaacgtcgctcgctttaaagatggttcaagaaccgtctttgtaagggtataataaccatctttaaagggtctttatgtagtagtgagtatctttgctttgtgtgcaaaaggagctcatcaaggatattttagacatgatggtttcttgttcaaagaaaagaaactatgtgttcctaaaatttctttgagagaacttttcttaagggaagctcatgaaaataatttaatgggtcactttgggatggataaaactttggctatgttacatgaacatttcttttggcaaaaaatgaagcatgatgtgcatagatttatttctcaatgcattttttgtcataaagctaaatctaaattcatgcctcatggttgtatacacctttacctattcctaactctcattggattgatatctctatggactttgtccttggtcttccaagatccaaaagaggaaaggattctatttttgttgttgttgataagttctcaaagatggcacacttcataccttggcataaaagtgatgatgcttgtgaagtggctaatcttttttttcaaagaggtagtgagactacatggattaccaagaagtattgtgagtgatagagacaccaagttccttagtcattgttggaaaacattatggggtaagcttggtactaaacttttattttcatcaacttgtcacccacaaacggatggtcaaaccgaagtggtaaataggaccttgggtcaacttcttagatactacatcaaaagtaatttgaaatcttgggaggaatgtctacctcacatagaatttgcttataatagagtagttaatagtactacttctatgtctccttttgaagttgtttatggctttaatcctttaactcctcttgatttattgtcattacctaacacatcttctatgattaatcatgatgctttgtctaaaacttcttatgttaggaagatgcatgaataagtgaaagcaaatgtggagagaaaaatgaaaaaatataccaagcatgccaataagcacaaaaagcaactgatattcaaggaaggagatttggtgtggcttcatttgagataagatagatttcctcatgaaaggaaatccaagcttcaacaaagaggagatggatcttttaagattttagaaaagattaacaacaatgctataaacttgaattgcctaatgaatatggtgttagtaatacttttaatgttggtgatctttccttgtatgatgcaggtccaaatgaagatataaacttgaggataagttcttttcaagaaggaggggatgatacaatcccaaaaccaaggcaagtgaaggaagacttggaattacacatggaggcacttcctttggtgattaaagggccaatgacaagggctagggctcaaacactccaagatcatatacaatccagcttatatctcttggacaaccatgaagaatgctacaaaatgttgagcttatctgttgtaatcgattatgagtagcctgtaatcgattaaatacacttgtataaatgttagatttgtaaatagctctgttgtaatcgattattccatcttgtaatcgattacatggaagtggaagttcttgtgataatcgattatttcattttgtaatcgattacatggatgtgggagtcctagtgataatcgattatttggtgaaataattgattactttgttcgtgaatcagcttccaggcctgatatgaacaaataatcgattaccaagatctagtaatcgattatttgattcaaaataatcgattaccattacaaaataatcgattaaagtcgttctttctgcagaagcgctatttttagatttaaaagctgttttggaaagcttgtcttggaagctacgtttgggtttcatttaggacgcatttacatttcaattagcttgtagattcgtggtctatataaaccgcatcacaacagatagtaagaacttttgattgaatgacattggattgcactttgtgtgtgagaggttgagagttattctccgttgttcttagtgaagaacttcttgtttcttatcaatagcttttgagctattgtggtgattcttgcaagacttattggaattcctattccatggtgtcaatccagttccacttctattcttcttcctttgttccaattcttacattacaaaaacctaaaaagctgtcataaaacagagcattcatactctatttttctttcaattgaagaattgattccattgcaagaaagatcaggacaaacaggacttgattcggtttaggagtccatcagaataacactttgaatcttttctttcttcagaaagcttatgaaaatactttgataattctttgtacctttaaaacacccaacaactatttatagaaaaatattgtaactgtcagtaactgattaattcactaatgtaattgactaaattcacttatgtaattgattaattactcatttaattgattaaagtgttcttgaactttctggaaaagatgtatgagtaatgtgatcgattattttgcaatgtaatcgattatcacaggaagtctttgttccaaaacgcgccaagtaatcgattaccatcatatcgtaatcgattatcacaagaagactattctgtgattttgtgtggtgtaattgattatcatactcttgtaatcaattaaagtgttctttaaaacttaagtaatagattaccatttgttggtaatcgattaaacagtgagaaattgtttttccaaaacataaacatggaacacttggctttttatgcaatcatgaaaactttatttttcagaaaatctttttcacaaaacttatgcttttatgaaaacatgaatgcaaaaacatgaatgagctttatgcaatggatcataggaagtctcatcttagacttacataaatacaactaccaatcaattgaattggcatgtaaaaagcctaaatactttgctgcctaaaagaattagcttcttgatcctcttgagctccccttgactctaacactgttgaaggtactgctcccattccgtgaatgtaagtaagatgttaaagctggctttagaaggtaccactacgaaaactataggcctcctcgaacttccaatgatgacttcaggtgctatcatcccatcagaactggaggattttccactaaaatcagccaccatgatgttgcgagggattaaatcatacaatgattttccaaacctcttcagcattgatcaaggcagaatataattgcagcatcatcgtcgactaacaccttcttcatctttcacccttcaaccatagcagacatgatcaagggtttcaaataagctttcatttttcagtgagagaatcgaacaagctgcattgaatcttggtgtcactcgagttacctgtgttatccacacaatttttgtttcaagttcagggtcttcaaaatattattctctttcataatcgagataacttgcactatctttatacttctcttcatactcagtaggcaaaatagatatagttccaacaatatcttccaaagcatcatcgaaatcaaattcaaaggtatcaatcactatttcttcctcattttcatacactagcctggattgatttttcagaatttggagcctacctagttcttgaccaagtgtgtcaccctgctgattttccatagccatcttcctcatcctttggttttgtctccattgggtcttgtgcatgttcccaaatcctggagcaccatagtgagacattttggcaaagttcgattcataagggttaaaaggcttgatttgatggttcttttctttctaaggtcccaaactcccaacaacaataggactgaagttttgccacttagtgtgattaggtgcacggattttcctaatccatttgttaggaggcactcaagcatttggaaagtatctggttctattctagaagtgggtgattagatcctgaatcggttttacagtcatcaaaataggttgttttcctttgttctaaactagaaacccttgagggttttaaatattcctttgtatctcagatgatttgaaagcttttgttgtagatctgtaaaaaactatggcgtaataggacttccttatcaccattttttttcaaattaggaattcacccaaagtatcacctgctcaagaacgaacattccttcaatctcaatttcaaagtcattgggtacctttttcacattctcctcagaaattagagtcctaatattagattgacatgctcaacaatatcaaccatcataatctacatgggatcaacaaatgcgacttgaatctgaaatgggttagtgtccactttcattggtttttctttgaatttcagacatcctcctttaattacttcttgaatcatatctctaaattgaatgcaattgttatatatatgatggaatttacaatatttgctaccctgtctctgtttagaagtgggtaatttgtgatcataacttagactaatttgcttgtctttaagtaaaatgtcaaagatcttatcagatttggacacaccgaagctatatgttttatttgacatgttatcttttacttctcctggttttaacaattgaaaaacatatgatgatcttggcctcaattttgctagatttatttcactttcttcaaagaaaacgtcataattaggattggtatcccattcctcggtcgtgttcttgtaattgacgtccacaaaagataccttatccattttatgaaacttgtcaaatttcatgtttctttctttttcaaatttcaattgttgaatccttcgaaccttgttagctaattgagccatgtccttaagtttttgatttactaatttcttcctaatcgaaatcttaggaccaacaacaaccattcgaactaatttatgtttaggaatttgagtaaaacatctggcttttaactgtcttaatctattgagatagtcatcaatagatccacattatatcttttcacattcatcaaatctatcaagcttactttttttccgcctctgaagagttgttcatggaacatttgaaaatacaatgaaaacacttcaaataaccaagaggggggtgaattggttaaaatagtcttttaaaatttttctttaaaacaatttgcgaaatttaaatcagaattttctttcaaactagattcaccttagaatgcatgttatgtttgaaatgcttgttgttgattgtatatcaatttccaaatacaagcaatgaaagaaccatagataaagaacacaagacactacaatttataccgattcacctcacaaacttggaggctacatccagtgtcttccaaccaacactaggttagagttttcactaaatcaaattattcttttacaagcaaaacaagtgattatctctatcaaccctagataaagatactggattctaaaacactattagaatacaaatcacaaagattctgagaaccctactcagatgtttactccttcaaaaccctactcaagaaagattgaaagaaccaaaatgatttataccacataattctaaaagaaagagttcaagaaatacacaacctgagatccttaacagatgatgaatgaatgtatgaagttaccaatcaatcaggttgaatgaatgtcaatgcacagactaatctttcttgaaatctcttttactcacaaactcatcatttccaatgtcaataactctttgatcttctcacaagatgtgtctctctaagtaaaatcagtttcttgaacttttgaatgcccttagagcttttggtaagactcaatctcaaaagtatatttcgttctctgatatgtttaagtgcagacccataaagcctttaaatagaaaactgatttaacaaactgtaatcgattaatccgttaaggtaatcgattattttaaaatatgtaatcaattaattcaaacagataatcgattaatatgttcttgagcttttctgaaaaactttcatgaacaacttaatcgattaatacgtgttgtaattgattaaaacagacaactgacttacgaaaacaagttgtagtaatcgattacatgatattggtaatcgattaaatcaaataagctcagatataaacaagcctttgttatcaatttcgccttactagtaattgattaaagcagacactcattatatgtaaaatgcacttagtcatcgattacgattttcctgtaatcgattaaagcagtcagacatattttgaaataacacttggtaatcgattatagaagagtggtaatcgattaaagtgttcatcatggcttttccagaaattaacacacatatgtaattgattacataatactgttaatcgattaacaaagtgcaaaatcttatatttccaaaaacataagccatgtgattttctttgcaaatgcaagtatttaatcctatatactacatatgaatgcatctaaatgaattatgcaatgcaaggatcactaggtaatgtacttgaaccacttagacaaattacaaatgtcatcaaaataattgggcatgtaaaaagctaaaacttcaagccaaatactttagccttgctttgataaacttgcagctcctacttccaactccccctatatctaacaatcaccccctttttggctttgaacatgacaaatttaattcaaattcaattgatcatttgtttagcattgaacttccttgagagtgaaagatatcttttaacttccttaaggaatgaaagataggaatgaacattatgcttaatcaacctgaaacaaattagcctcttgccaagaacaagtgttaagtatattaagtttcaagtatccatacatttcataatcattttctcccctttacgtagacatatttgttataaaaaaaaaacagagcaggacaaaatagagcattttcatagaacaaaacatcaattatttgattaacaaagcatcaattattaacaaagcatcaattatttgataaagcatcattgatttgattatttctccccctatttggctgattaaagacaaagatcaataaaaaatagaggtaagaaattaaacttcatttcattgatggaaataactcagtacattaatcataaaacagaacataagaatttaaaacaaacataaactaagatgacacttaagtaaaccataagcaagaaaacataaaaagctagctatttttgttaacattatctagaacaagcctaacttctatattttcaagcctagttttcatctcttccaaagatgaattggtctcaaccctatgttagtgatgaagagtgagtaaagcttccaccttttgaaccattagtgattcaaaaggagagtattggtactcaacaacaccttgttcagttttagcttcagcttcttcatcttcatttcctcctcctctagcagcaccttcaggttgttgcatctcacctaccatttgtcacccttgtggtgtttttgtcagaccaagcttttggagatgcttggttttgatgagattgacaatatcagaggtattgtcaactatcttatcaaagacatcaatatggaagtaatcaataaacctagagattaatacaacatatggaaaactatagttgatcaatttttttgccttcagcatagtctcaacaaacccaagtggccagttaatttgggtagtagatttgatgccatacaaaagctgtaggtcatcatctgtggcttgtcatgatcagtagatataggagtaaggatgtaggtaatgagatagtgaagaagtttcccttcactagtcatatttctgtgccaagccttagcttcagcctagcttgagggtcttgaagcatccctttatgggtgtcaatcctattatagccacctatttcttcctcaaatttcctggctccattaggagagatgccagctactgcttgccaaacctcttcatcaatcaccatggaaacaccatttacttgagagtgaattaccctttccatggtagccttcatacaggtgtagaacaccttcactaactcagagtaaaatgtacccttaagttctacaaacttcttcaatccctgaatttcacgaaggtcaaggaattgaaaaccttccttgacaaaccagtcaaggttcagatatttagggggcatgattaatttggtgggattaaactgggtataggtcattctatccttttcttcaaggaaccaagaatgcaatctgttccctgtggatttggatgactcatcaacctttctttttccagtttttactctcttagaggtagacattatgtaggaaatgtattttgaaatctggactagaagaagaaaagaagaaaactcagaaactcaatgagcaagcttgaagagagaaggaattcaggtgtgaatttctctcttgagaaaagctgaatttatagacaaaattttgtgctcaagtttgaattttaaacgttgtaactgttactacacattcctaggccataactttatagttacagattcaaattttgaattttgaatgaaatatgacagtttagattttcaaaagttctgtagagttttagtaactgccatacataatggattacagaagaaacgtaatcgaatattttgttcttcattaagacaaataacagaccagtgatcgattatttcatgacataatcgattaaggcagataacatttgaatcagaggagagtttgcattgaagtgtaatcgattaaactgaagggtaatcgattaaaacagagaatagttgaacagagaagtatttcctttgagttgtaatcgattatttcgtaaggtaatcgattaagacaaagcgagacaagaatcaaaatccaatttttatgaagtgtaatcgattattccgatagtgtaatcaattacatatcataaaaaatgtctctaaattaaggttaaccatcaaataatcgattctcccaagtggtaatcgattaaacaagagcattatgcagaaggaacaaagtatatacattcaatttcgaatttcaagcacatatgatgatattgctagatgacatgtaatatcatacagattatcacacaacaagcaagctatgatatattagattcatcaagaattcctaacatgtttctaagtgaatagaatctttctcttgctaagggtttagtgaatatatcaactagttgattattagtttcaacaaactcaattttgatattacccttttgaatgtgatctctgagaaagtgatgtctgatctcaatatgtttagtccttgagtgcattactggatttttagatatgttgattgcacttgtgttgtcacacaacaacggaatttcctgtagctcaacaccaaagtcttgtagttgttgcttcaaccagagactttgtgcatagtagcttccagcaaaaatatattcagcttcagcagtagataaggctacacaggattgtttcttgtagtgccaagaaatcaaagaacttcccagcaagtggcatgtaccactagtgcttttcctatccaatttgcaccctgcaaaatctgagtcagaatatccaattatactaatagaagtaccttttggataccataatccaaatttttgtgtagacttaagatatttgagaatcctttttactgcagtaagatgagattccttgggatttgcttgatatcttgcacataagcaaacacttagcattatatcagacctacttccagttaagtataacaaggatcctatcattgctctgtactttgactcatcaacactttttcctttgtcatataagtcaagatatgttgatgtagccataggagttgcaacatctttactcttttccatctcaaatttcttaatcatttccaaacagtactttgattggctgacaaatgttccattcttcatttgcttcacttgaagtccaagaaagaatgtcaattctcccaccatagacatctcaaactcactctgcatagagatagaaaattccttgcacatagactgattagatgaaccaaatattatatcatctacataaatttgaactatcaaaatatcattgcctcttttcttgatgaacaaagttttgtccacttgtcctcttatgaaagattggtcaatcagaaatttgctaaactttcataccaggaccttggagcttgtttcaaaccatacaatgtttttcttagtttaaaaacatgatttggatgtttaaaatcaatgaaaccagtaggttgattaacatatatctcctcctcaatatatccatttaaaaatgcatttttaacatccatttgaaacaatttaaaacccattagacatgcataagcaaccagcaacctaatggcctccaatctagcaactggagcctatgtttcatcataatcaatgccttcctcttggttgtaacctttagcaaccaatttggccttgttccttatgatgataccactttcatcaagtttgtttctaaaaacccactggtgccaataggtttatgagaagagggtctaggaactaatttccaaactttatttctcttaaattgatttaattcatcatgcatggccatcatccaatgttcatcaagtaaagcttggtcaatgctttttggttcaatttgtgaaacaaattccattgtacagcaaagatttcttaaagaggatccagtagaaactccctttgatacttcccctatgatattatcaagagaaagatctttagtagttctccaatccttgtgctcttaaatgggtgttgaatgttccactttgtcatttgaatcaagctttagcttttcattaaactgcataacatcttcctattgttctgcatcattatcacattctttttcctccttggaggtgttagattcatcacaaatacaatgcactgattcttctacacataatgttcttttgttaaagattctatatgcttttctttgtaaagaataaccgaaaaagataccttcatcagctttagcataaaatttgccaagagaatctttaccattatttaaaacaaaacatttgcagccaaatgctcttaagtatgaaatgtttggctttcttcctttgtacaactcataaggagttttcttcaaaagagagctcatgagtaatctattcaaggtgtagcaaacagtattcactgaatcagcccaaaaatgctttggcaagtttgtttcattaagaagagttctagcaccttcttcaagggatctatttttcctttccacaacaccattttgttgaggtgttcttggagcagaaaaattgtggttgattccatattcctcaaagaatttttcaaaattttcattttggaattcaccaccatgatcacttcttattgaaacaatattgcaagctttttcattttgaatagtcttggctaattttctaaatgttgtgaatgcatcattcttagatcttataaacaaagtccatgtatatctagaaaaatcatcaacaatgcaagaccatagtaattaccacctaagctcatagttattgaaggaccaaataagtccatatgcaataactcaaggggtttagtagtagaaataacattttttctttgaaaggaattccgtgtttatttccccttttgacaagcatcgcatattttatccttctcaaatttgagcttaggtaagccagtgactaagtcttttctaatgagctcattcatatgatgcatgttcaagtgacttgctctcctatgccataaccaagtatcattagctttactgattaggaaactagtgttgtgaatgaatgcttgctcaatagaaagtacatatatgttgcccttcctcttaccaacatgtataacctcaccattttgactatcacggatcaaaaacagttatcattgaaggaaatattgaaccctttatcacatagttaatttatgcttaggaggttatgttttaatccttcaacatataaaacatttctgatcataatcttgaggttgtctcctatgtttccttctccaattatctttcctttattattatccccatatgccacaaatcctccatcttttagtttgacatttgtaaacatggatatgtcatcggtcatgtgtctagagcaaccactgtcaagataccatagtgatgatattgttctaaaacacacttgcaaaatttaaatcaagtagcaaagaaaggtacccaattaaggttgggtccataggggttagctatattctttttctttgacactcaaatgcgttctccattaggtacataatattttctagcaaaacacttataagatgtatgccctctcttcatgcagtagttacaagttacagcttttgatgattttccaaagtaagtattttgattaaactttgaattataaaagctcatttgattcttctgttttagtggtacaaatacagtttttctaaaaggttttgaaccttgtttgtaacctaatccagaagtatctccaacatatttttgcacacttatttcaggtaagttgctttttcctttataaaactttttcaaaagaccaatcaagtagctattttcagaaagtagtaacatatacttttctccttgacttcttttgaaatcatcaaactcttcttataacaacttgcatttttcaaccttagaagaggaagacggacatatacacccattggccttgtaacttgaaagaagtttttcattctcttctttcaatttacaaagttcacttagcatttctgcaagtttggtgatgtgccatcttaaatctcctttaagcttattatttgattttgctaacctttgatcctcattatgcatatcatggaaagcataaacaatttgatcatattcagaatttacctcaaatttatcactagagaattcttcatcatcacttagagttgaagtgagacaaacattcgcttcttcttcattctcactagttgatctgtatgttgttgattcattatcttcccaagcaatatatgctttctttggcttagcttctttcttaatcctcctttcaccttgttgcttctttagaaaactgggcaatcagatttgatgtggctagacttccacattaaaagcatgtgaagttagtggatttgttgttgttgctatcctttctactgttgaactttgacagttttttgttcttgcttttcttcatgaacttgctgaattttttactattaggttcaggttttcatcactctcatcttcatcacgtgaatcttcttatatctctacatttgatgatgcaacttttaaatctatactcctttgttttatatctgcattctcagaatgtgttaattgagacatttctaattcatattcaagtagcttacccaaaagtgcagtcattgacattttggagagatctttggattcttttatagctgtaacctttggatgccatgatcttgtaagacttttcaggattttgatgtttaactcttcaacatcaaaagtctttccaagaccaagaagatgattcactacgtgagtgaaccttgtttgcatttgagatatggtttctttggagttcatcacaaacatctcatagtcatgaatcaaggcatgtttccttgatcttcgtacttcatctgtgccctcatgagtaacctctaacatttcccacatctccttagcgcttttacacctaacagtcctgaaaaactcatcagaagaaagtgcagagatgatcatatttctagccttaaaatcatattgcactattcttttttcagcatctgccatttcatcccattctttgggaatcaatatactatcaacaattttcattgggaccaaagaaccttcctcaatagcattccatgcaccaggatcattagattgaataaaaatctgcattctacttttccaaaactgaagtgttctacctcaaacatcggtggaagatttagggaggcaccctctttgaaagtaatctgagtggtattcattttctttatgaaagatagtgatcttgaataaatctcaagaaccagctcttgatactaattgaaaatacaatgaacacacttcaaataaccaagagggggggtgaattggttaaaacaatcttttaaaacttttatttaaaacaatttgcggaatataaaacttggatcatatcactcaatcaccctttatcaaaatctaattttctttcaatctagattcaccttagaatgcatgtaatgtctgaaatgcttattgttgattgtatatcgatttccaaatacaagcaacgaaagaaacacagataaagaacacaggacacaacaatttatactggttcacctcacaaacatggaggctacatccagtgtcttccaaccaacactaggttagagttgcaacgaccacttttatttcatttcaattcgtctttattttaaaaaaaaattgtttttttttttttaaacgtatagagagaaaatttaaatacgttttccgtcaagtttgaaacggtttataaaaactgaaaaatcgaacacagcatacacatactataactgaagagtttcatacataattaccatgcaaactatgagtacccaatttatatggtgatagtccaaacagtccaaacagtccttaaagtccatatacagatacaagcagaaaccacaaaacagagaataatcataacagtcttcatcccgtttccttgcataatttccatatcactgttcctctgctcgcccaaataattggggtcattacaggtgtcaaccacaagacacaaaatagggtaagtcatgataaataaaatttaaatacacatacaatgctaagtacagaattaataacatcatgtattatttatttagaaacagaatacgtactttaatcgttatagttatttcttttcacacccaccaaattatttcttttccactgatagcatctaaagaaaatgcatgcttatcttgattatatgatgcatgactgagatctcagcaacatgtaaatagttgtggccactgtcagataaccccaccctcacctcagtggaacgaacttatccacccagtcggggtagctcagtggcgcataggattatcatctcccatccatgtgatcatcatggtggtgtggtcctcactgtttctacccccaagttatatggactcagtttagttatctgacacatacacctctttacgaggatcacct
